United States Patent Application Publication US 2022/0267820 A1 - sequence listing, part 3

SEQ ID NO: 6937 - protein, 523 aa, Xenopus tropicalis
MAAGRKSLTLGLLVQHFVLLQGAKILTVTFLGGSHYLWMDGISRILHNHGNEVTMFRQIADGLLPDYQMQESPYRLVTWSLDENYLKEYGEFFRDSKYNFKGSDELSSYLGLFTHLSRQCKMIFNQTSILNLLKEEKYDIAVIDSFNPCSFLASEKLGIPFIATHPFAVKSPWHSGIPNLLSIMPAYQSQLSDHMNFFERVKNVFFYIDSAVLEYKIHSLFDDVIEEHFPVGSRPSFAELYKKAALWMYNTDFTIEFPHAFFPNVLYIGGVLAKPAKPVSQELEHFISQSGEHGFILVTFGSMIPSNPLTEFVKEMNDGFAKIPQKVIWRYRISEWPKELQLAPNVKIMNWIPQNDLLGHPKARLLVTHGGVNSVQEAIYHGVPMVAIPLFFDQFDNAVRIKAKHLGTFIPSDQLKAEKLANAIRHVIEDKSYKNSAMHFSLIQRSQPFPKEQQIVRWVEHIVTVGGANHLIPYSYQQPLYQQYLLDVILFVCVCLIGACYITVKVLRLFIQRLCSVRKVKQN

SEQ ID NO: 6938 - protein, 529 aa, Drosophila mojavensis
MKLQSLSLVLLCCALAALPQARPANILAVYAFPGKSHFMMHTALIKELVESGHNVTMITAFSLSAQQLGGNYTELLIEPVYDFWHDVKLSFGVQHLFDLTQMKNYDFLKMLEIIGLKTTEHALRQPKVQALINARQTEGVFDLLLAEQFYQEAFLALAYKYNIPIVTTSTLGYENHMSQMMGLITPWSFVPHGFMPFTDRMSFMERVHNTYVSLYEDFDRLLSYFPKMDAITERYFGQVLAEVPKVRHMETQISVMLLNSHAPLTTARPTVDAMVPVGGMHIYPPKPLPADMQSFLDAATDGAIFFSLGSNVQSKEMPRDMLQLFLRVFGSMKQRILWKFEDESIDQLPPNVMIRKWLPQADILAHPNVKVFITHGGLFGTQEGVHYAVPMLGMPFYCDQHLNMNKAVLGGYGISLHFQSITEDLLRDSLLQLIHNASYAENVQRVSRIFRDRPMSPRRSAVYWIEYVIRHKGALHMRSAGLDLRWYQFYLLDVIAFLGVLALAALFLLLLAIRLLQGSGRKQRKAKTN

SEQ ID NO: 6939 - protein, 486 aa, Ceratotherium simum
MSMKWISVLLLLQLGCYFSPGSGGKVLVWPTEYSHWINMKIILEELVQRGHEVIVLTSSASILVDPNKLSAIKFEIFPTSITKHDILGFALKLTNKWTYDMPKDTFWTYFSLMQEIFWEYSDIMEKFCTDMVLNKKLITNLQESRFDLILADPIGPCAELLAELLKIPLVYSVRFSPGHKIEKYSGGLPYPPSYVPVVMSELSDQMTFMERVKSMIHVLYFDFWFQTFNEKRWDQFYTEVLGRPTTLSELMKKAEMWLIRTYWDFEFPRPFLPHFEYIGGFHCKPAKPLPKVIWRFDGKKPDTLGPNTRLYKWIPQNDLLGHLKTKAFITHGGANGVYEAIYHGIPMVGVPLFADQPDNIERMKTKGAAVRLDFNTMSRTDLLNALKTVINDPSYKENAMKLSRIQHDQPMKPLDRAVFWIEFVMLHKGAKHLRPASHDLNWFQYHSWDVLGFLLACVATAIFVITKCCLFCCQKFSKRGRKEKRE

SEQ ID NO: 6940 - protein, 929 aa, Tribolium castaneum
MKFLSLLLFLSVLHNNVESSKILVISSMPAHSHYILAFRLAKELADREHHMTLMSPYSQKTPVKNLKEVSLEDTIPWVNEFKKSLFNSPKTLLSNVQENYVLGGGTTEYALNNTNVQKLLNSGETFDVVILEHFLNEALLGIAHHFNCPVILLEPIPTSKKTNYLFANPSPSTYVPDLMGTFTKRMSFWQRLQNFISNNLDAVLREFIYLPVHRKLFDKYFKTGINLNVLLHNISLMLTTSHPSVNDAIPHTPNMVEIGGYHILPPKQPPQDIQNYLNNASEGVVLFSMGSNLKSKDLTLNVRKAILNSFSKIRQKVLWKFEADLPEAPANVRIMNWLPQQDIIGHPNIRAFVTHGGLLSTIEAVYYGIPIIGIPVFGDQKSNIAAAVSNGYAIEVPLAELTEEKFSSALNEILNNPNCFDTMSSLAVIFWLVCGVHSEKILMVSTVPTYNYFNQIFRLVEELVSRKHEVTFINPYPSIVELENLETINIDLSKKLEQVMVNRVNYVNSGAIARTLNAFDASFWTTEHVLRDKQFQKLLNSTKKFDLVIVQYFLNEAMNQLGRRFNAPVIYLSPVGETFRTNLFFARPSISSYIPNDFSSFPVQMNFWQRTENLVTNIVIDLLREFIQLPKQHSLALKYIGSGSHLYNVSLMLCNAHASVHNTFVQTPASIYIGGYHIRAPKALPTDLQNYLDSAKHGVILFSLGTLTKSSYLKPEALKSILGAFSRMKQNVIWKYEGTLSNASSNVKTVNWFPQQDILAHPNVRVMITQGGSSTMLECVYFGVPVVGLPMHADQNTNIARATSHGYAAKVSLNEITENAFYETLQEVINNPKYKENVQKRSKLMHDQPLKPLDLAVYWIEYVIRHKGAPHLRSAGLDLRWYQREMIDVIAFLTACVTAILAAVYLTIRKVICGRKSGKKPTTLEKKIN

SEQ ID NO: 6941 - protein, 537 aa, Wasmannia auropunctata
MRLIIGISPIITILWILITSNLVWSKRLLIITPAPSYSHQIVFRAISLALNKRGHEIVTLTPNILNDPSITNYTEIDFGFIYEKIDDTDLSQTRWNLTQLAGLKTRLLKLGHNIAEDVLSHPDLIKYYANGTDVQFDAVIAEMIMTPAIYMLAHRFNAPLIGIMSMDLQNCHRFTLGSPVLPSHPSNWELENLTGLNQPFWRRLVNFVNTWWSIHSWFNNFVSKQQKIAEKYLGNDIPQIIDVAKNMSLILINQEPLLAYARPEVPNIVHFSGLHIAKTPPSLPKNLKNFLDGATNGFVYMSLGSNTKSKLLPKKILDVFVNTFTNLPYKVLWKFENDSFHVPSNVFISKWIPQQNVLAHPNIKLFIYQGGLQSTEEAVHYAVPLIGMPFVFDQVYQVMKMVSLGVAKYLDVVRLTTSELRDTILEVVDDKGYKDRMLALRALTKDKPYDSLENVIWWIEFVMRHNGAPHLRFNGVDTAWYQQFDLDIIVFLTITSFLVSCVILGTVGWASKQVYTYYDIGNRCTIRKWIGSKMKTA

SEQ ID NO: 6942 - protein, 533 aa, Maylandia zebra
MQVPTYPLLLLPLSLLLLHSVAPVHGGHALVFPGEFSHWLNMRTIIEELVKKNHSVTILVPDASPTVNYNNSRDAAKFNFLVFKVPYSKEEYLSPIEEFIHFSMHDPSMLQVAMKLIDFMGRSLDFGRQQCDGILKNDQLMATLRDAAFDVVLLDSLVMCGDLVADVLGVPLVISLRLSLGSVFERHCGHAVFLPSYVPVAPVLYNDHMTFTERLINLVTYVASSVLTELGWKLTMDKYYSEIKGTPTSVCETLGKADVWLIRTFWDIDTPRPTPPNFKHVGGLNCRPANQLPEDLEAFVQSSGDPGVVVVSFGSMVPNLTMERTNVIATALGRIPQKVIWRHRGEAPPALAPNIKISDWIPQNDLLGHPKTRAFVTHGGTNGLYEAVFHGVPLVGLPVFGDQSYNLNRMSHLGTAIVLDFNKVTAEELAEALHAIVNQPSYKTSMQRLSAVHRDQPVTPLNTAVFWLEFVMRHGGARHLRLASHNLNWFQYHSLDTGAVLLITLMTAAALCWVVIRCFLQQCRRRGGREKED

SEQ ID NO: 6943 - protein, 519 aa, Drosophila willistoni
MRLVFPIGFLLLASLANVWGYSYLILAPTASKSHYTVMSSLAKGLAAAGHEVTYISPFSQSKPVKNLTEITTPNVIEAMKVSKSKILQNTKLSIWKRYPVILAMGLKITNTFLEEPKVMAFMKEKRTFDAVIVEVFMNEAHFGFAELFNASLITVSTFGASTWTTDLVGTPSPPSYVPHLMTELKDRMSFLERAINLAFISFEFVYLKWFSMPRQHSVYHKHFPDNKLDFHEMQRNTALVLLNSHVSLNFPRPYAPNMIEVGGMHINYKTKQLPKDIEEFINGAEHGVIYFSLGSNVRSKDLPLEKRKAIVETLKGLKQRVLWKFEESNFAEKPNNVFISDWFPQDDILAHDKVIAFITHGGLLSTTESIYHGKPVIGIPIFGDQFTNMARAVQSGYGASVKYSDLTYERLHNAIKAVITDPSYTEKVRAMSRRFRDQKETPLQRAIYWIEHVSREKGAQYLRSACQDLNFVQYHNLDVFALFFGILLSILVALTILTNILVRFLKTKLGNSKVKHKKL

SEQ ID NO: 6944 - protein, 541 aa, Daphnia pulex
MSTQFSAKCLLVVLSAAIGLSAAHNILVLTPITSPSHSNVFKPLVAELANRGHFVTYWNGLLQSDKSSSVIQSNQTTTNSSNLRLLTSPNLVRLNNQHQIDFNDRDSPFRLLFRMQATIERYCRAIYEDPVFHQLMNSKERYDLIILDGFSNDCTLLLAEVFDVPFIYLNCFPPSPWLLYAIGSPLALDHFPNPAGTRDKMDLWQRTFNVVTSVFAVYFHRWLVLPEIDRVASKVLRKNNLTSVAAIENRYLSLILSNTHFSINFQLPTSPAVVEVGGLHLGEARNEIPKDLVSFLDGSGDAGFIIVSFGSMLRGDGLPKDFRRLFLSVFARLPQRIVWKWEDQSKLGDGEELIPSNVKTISWLPQKELLSHRNARLFISHGGLLSKQETVFHGVPAIFLPIFADQPINAQKAEDDGYAIRLDLGKLTEEMLYNSIQAILTNPRYAKRMGQVSALMHDQIDNPMDRAIYWIEYVIRHQGAPHLRNASRDLFLLQRGLVDVFLVILAACLLMAYGAVYLCAAVCHSRYGSKKLAVDLNKKGE

SEQ ID NO: 6945 - protein, 491 aa, Nematostella vectensis
GAKIVGYPIMAGSQYIGMKRIAQELAARGHEVTLLVSSIQKFTPTEGITHAVYQVPVNKSFIENLVSRTIKSGFKALYGKNSVGAAQEMFCKATLDATDIIDPMKKSDLIITDSSMMCGAVLAEYLNITRVDYCSIAPSLSTMYQYHGPSFPAYIPQLMSGNPARMNFLQRVKNTFNYVAGQLIARVVMFPKFDEIKQRYGINPESSFAEAIGKAQMVLFLYDPAIGYAFPLLPGHKLIGPVNIQPPRPLSSEFQQIVKKSDGVIIVSFGSNVAAIANKEVDVLTEAFGRLKETVFWRQKGKRYIPANLSPNIKTVEWLPQNDLLANEKTRLFVSHLGQNSLYESGYRGIPLVGVPLWGDQFDNAVLVKDKGLGLVVDIHTVTADEFYRAIRRVIDEPGFKENAARISRLMRDRRRSPTQEAADWIEYTLRHGNLTHLRPASVHLTWYQYFLLDVMLFMGVVLLSVAMVIRLVFKLICWFCCRKQTKTKTQ

SEQ ID NO: 6946 - protein, 479 aa, Haemonchus contortus
MLLILTCTFLTISDTAKVIFNGMHSSDSHIASMLPLATRLAKEQHVVHFLETNTKPSHFNYPNNITFTHVELQKDPFFVSCFLKVMWIKIFSSIEFPRIWETGDKAFVEMLDQHPEKITKVMNESWDLVVADELFAVASYALAMKAYNNRKPFVTLSTCIPTNLIKYHFALGTPFSHRPSMYHRLAVPYRIEQFASRLYSVLHETYQAIRTQHVTRHVAVKGLHKVGIYNFDFSKLATHSAYHFLEDIDSLVYPAPVSSAIVEVGFYCRKAKELPNDYDEFINDPTSKGTILVAFGSNIIWDYAPPDIMAAMLGAINRLSDYRVVFSYNGNMEHVRFLDSHVKVTRWAPQKDILAHRKTVVFVSHGGLKSVKDTICGAVPVVYIPLFAEQSHNCEMARAAGFAEVLHKSRLTADVIERAVRKVAETPQYKESVIRINTFYRDRIMPSLDIAEFYVGTWAEVLLFGIKGLDIMFADIVTV

SEQ ID NO: 6947 - protein, 535 aa, Caenorhabditis elegans
MSRVLCVLLFSVLVSHVESYKFLVISPVYGYSHMKFMAIIANQLADEGHQVTYFQPFVIEAYLDHKLLNNSLIDVINYWHDEEGRRHIPPSNDLHDAWYSSKYQSALSAVFDMPQFLVSAWEHMCRKIFQDSELHKILKDKDFDVVIAETFDFCGLYLADYIQSKSIVSVFTGSRLIAITDPLGEPSSLHYIPAPSSDNFGSSASIFDRINDLYHKYVFGSGYSIIFDWQYNQIARLTHGKVRHWKKILKDVTYHFANSNPYLDFAAPTISKVIPIGGYDMDKSIQTKIPDEFDSILNERSLTVYVSFGSMVKAKFMPESYKEAMLRMFTANTQNITFLWKYEDPTDIFFKNRLPKNVILKDWFPQRALLADKRVKLFITHGGLGSTMELAYAAKPAIVIPLIAEQPDNGKMLARHGSAEIYSKHDIPHWEKLNRLLQKMLQHSSYQKAADRLARVLSNQPIKPRELMIKHSEMAAMFGKMPELTPSVQDMSIIEFYNLDIIFLFLIISIGTSVLLWKFLYFVLTDSGSFKSKED

SEQ ID NO: 6948 - protein, 428 aa, Vollenhovia emeryi
MAEDVLSHPDLAKYHANGTDVQFDAVIAEMIMTPAIYMLAHRFNAPLIGIMSMDLQNCHRFTLGSPVLPSHPSNWELESSTGLYVPFWSRLVNFVNTWWSIYSWFNNFASKQQQIAEKYFGNDIPHVIDVAKNMSLVLINQEPLLAYARPEIPNVVHFSGLHIAKTPPSLSKNLQAFLDDATNGFVYVSLGSNTKSKLLPQETLQIFADAFASLPYKVLWKFENDSFSVPPNVFISKWTPQQGVLAHPNIKLFIYQGGLQSTEEAVHYAVPLVGIPFVFDQVYQVMKMVSLGVARYLDIVQLTTSELRDAILEVADDKGYKDRMLALRALTKDKPYDSLENVIWWIEFIMRHNGAPHLRFNGVDTAWYQQFDLDVIVFLAITSFLVLCAILGAVGWVSTQLYIYFDLSNRCILRRYIRRIMNEKTKSA

SEQ ID NO: 6949 - protein, 497 aa, Ancylostoma ceylanicum
MRCLALIFLFVKFVQPLSIVVYLSLVGKSHVDFVSALINILVERGHEVNPMNFCACSGIFDKSGPPTGSAKHACHNKWDTQSKRDGLASGEPARFLSRKKYDVGLTSDYDFCGYILFHQAGIKTVASFTATNLFAHQAFSLGLPSPPSCVTGNFDKSSGSPRPDLFERTVRLLKSARFTFVERPEFEELGNGLIREFFGKGFPSTGELLRNSDLVFVNTNEIIEKPRPLSHKVKYIGGIALRKPKPLPDHLGILLSNTTKNVIFSFGTQVPTEKIPLHIRKSLVKAFVQFPDVTFFWNYKMQGDEGDMFANAYNVKLMEWLPQTDLLNDPRVVGFISHMGLNSFLEASTAGVPIVAIPLFADQTHNAHNAAYRGTTVIVKPEQLTTESMKRALEKILYDPRYMENAKLISQMMKGKPEMGREKFVEWIEFAAANKGLHRLLNLPGNDIGVLEYYCIDCMLLLLFAFFAALMFIWKITSKFVRIVRKEDISQGKLKTN

SEQ ID NO: 6950 - protein, 395 aa, Anopheles darlingi
MAARILIVTGLLAASCCSASDILMITMGGTKSHKIPFLELAKGLIPRGHNVTFLNGFPADFTFNGLQEVTPSGLVEYIRNYTNWDLLGARMRGDLPLSVWDVFRFPWQICDATLEDKETLDLLGRKFDLVILDGAFPECALGLVYRLGVPFMYINTVGFYTGTMSLAGNPTPYSTTPIFYRPLTDDMSFIERLSNTIACIHCKTASPLPKDLEDFIAGSGESGFIYVSMGSSVKAANMPDHLRKLLVQTFARLPYRVLWKYEASPALLTDLPENVKIGRWLPQQDILGHRKLRAFITHGGLLSMFETVFHGVPVVTMPVFCDHDSNAAKAVADGYALKLDLETLTSERLVKAIHKVIHDPKYRKAANNRRYYKIVFNASIVFAREYVGERFLTPV

SEQ ID NO: 6951 - protein, 519 aa, Anopheles gambiae
MRISWYSLVGFLLSLGVTVNGANILCLMGVASPSHHIWNRAIMDGLARAGHNLTILSADVEKNQPNNVHYVHLEEIYPTLYSGPDSIDLMEMANENVFKSVVSFYRDFVVHECAGTLKSKGLQRVMDYPDDFRFDLVLHDFTCGPCLLGLLHKFNYPPLVSVTAFNNPPYSTEVIGGHKFYSYVPFYSLSYGTDMNFFQRVHNTLLCLTDVVYRNYVSNPRIDAMMREYFRYDDLPYAPELSQRTKMMLVNAHYSIDFPEAAPPNLIPVGGLQIREPAPLPADLEQFVNASRKGAVLFSLGTNVRSDQLDSGRQRMIVEALRQLPDYHFLWKFETELGIPLPKNVIVRPWMPQNDLLAHPKLKAFITHAGLLSTHEATWYGVPIVGIPFIADQHRNLERCVRSGIAKRVAFQTMTTEELRDAIRDVLEDPQYRTNMAAQSALFRDQPEKPLARAVWWIEWVLRHPDATQLQSPVLKLGFVRTYLLDVALFFAAIPVLLVFLVKRWLRKSRSVSEGKKRN

SEQ ID NO: 6952 - protein, 534 aa, Drosophila virilis
MASATNRILLLAIVAAVFISGSQSANILGVFTSLSPSHLIVQMSMVKVLAENGHNVTVVTILKPPITHKAINVVQVPLSDEDQRMMSATIGKMVASDNSNMVISMFRVMGQMKLMFEKMRDAMMDQRVKNLYENKDNKFDLVMIGYFLNNYQLGIAHKLKVPVILAATMPPNQLFNKMLGNPQLDSHVPALPGISVKGQPMTFSQRLKNYITTCAMGIFMWILENNDAKDYKKVFGDDPNMPPYEDLAKNVSLTFFSSHAPSEGPIRPNVPGIVEVGGIQIKDKPDELPKTIADFLSDAKDGAILLCLGSNVKGAHLKPDTVQNMFNVLSKLKQRVIWKWENLYKTPGKSDNILYSKWLPQDDILAHPKIKLFITHAGKGGITEAQYHGKPMLALPVFGDQPDNAEKMVKDGFGLSLSLATLEEQPFHETIVQVLNNPQYAQKVQTFSSLYRDRPISAHESVLYWTEYVLRYNGAPHLQSPLVHMNYISANNLDVYALLITILFVFIYVSKVILTKLYRKLFGKAQKTKKIKKS

SEQ ID NO: 6953 - protein, 522 aa, Bicyclus anynana
MWQPVLFVLAILSAVCMSEAYRILLTVATPSKSHGILAEGLIRHLTEAGHEITYIFCIPPEKPLPGVKLIDVSDNMVLPVNIINLKNILDKTSDLSEATGFVPLILEQSKRTIEHPNVQKLIKDTSQQFDVVIMEFLYNTLYAGFSGLYDCPLIWFSPTNPCSSLFELIDEPTNPAYSVGIWSTNVPPMSFTQRFEELISYLNNKLIRIFWSSRFDNEEYEKHFAPLIRERRNIAPSFETLAYNGSLVLSNSHPSMSGAVRAPQNFISIGGFHIDRNVKPLTQEFQKLMDDSKYGVVYFSMGSNFRSKDLPSEIKRDLLSMFGKLKQTVVWKFEEDLPDRPTNVHIVPWAPQQSILAHKNCIIFITHGGLLSTTETIHYGVPIIGVPVFYDQFVNVGRAVSMGFAKRVDLTYEFAKDLELAILDILGNPKYTTKVHELSEIYHDRTVPPGKELVHWVEHVIKTRGAPHLRSPGFMVPWYQKLYLDLVLVVLIIVLLLKYTFGLLLYKLKKTNSVRSRKEKNK

SEQ ID NO: 6954 - protein, 520 aa, Trichoplusia ni
MGVFLYLFTCYILFTQSNEAARILVVIPTPSISHQVVFRPIMQELVKRGHEITIITTDPAYPKGGAPANYTEIDIHDVSYGIWKNSFMVANKGDKGDLYNQMKMIVTLFNVIFEAQVRDEAVQRLINDKTQKFDLIIAEGCVKPALGFYHIYKAPIVIMSSFGAFYDNFQTIGAPSHPLLYPMFVRLKLNNLTMWEKMTELYNHYRLESMFYENLLESDQLLRRLFGEDKPSLMEVYNHVEMLFLYENPVFVGPRPVPPTVVYMGGFHQNAPKELPKDLKSYLDSSKNGVIYISFGTNVDPTHLPADRIEVLVKTLSQMPYDVLWKWNGDELPGRTDNIRISKWLPQSDLLRHPKIKVFVTQGGLQSTDEAITAGVPLIGVPMLGDQWFNVERYVYHKIGVRLDIDVMTVDNFRSALFEVINNDSYRQNVVKLRTLMRDQPQSPLDRTIWSLEHLLRHGNAKHLRSPTANISWWDYLELELVFTLLAVLFAAISLVVLAVYSLYKYFVRNYVAVIKVKHS

SEQ ID NO: 6955 - protein, 520 aa, Trichoplusia ni
MGILLGFLTWYLLLTNTNEAARVLVVVPTPSVSHQVVFRPVVQELAKRGHDVTFITTDPAFPKGEAPANLTEIDVHDISYRAWKEALMKATSGNQGDLYEQMKTILSMAGGVFEDQYNDEKVQHLIHDKNQKFDLIIVEAFSRLALVYQHVFKAPLVLMSSFGATFDNYEALGVPTHPLLYSSVIRQRINNMTTWEKITETYQYFKIHSLFNEILVEEEKLLRKLFGPDVPTMKEFYDRVEMLFLNENPLFTGIRPVPPNVIYMGGIHQKPQKELPKDLKSYLDSSKNGVIYISFGTNVNPTLLPADRIQVLVKAFSQLPYDVLWKWNGDELPGRTENIRISKWLPQSDLLRHPKIKVFVTQGGVQSTDESITAGVPLVGIPMLADQWFNVEKYVTHGIGARLDIETITVENFKETLLKVIKDDSYRQNTVRLNNLMRDQPQTPLERTIWWLEYLLRHGSAKHLRSPAANISWAEYLELELVLTLLAGLLTAISLVVLCIYYLFKFFVKNGVSNSKVKRS

SEQ ID NO: 6956 - protein, 532 aa, Caenorhabditis remanei
MRMLVLSALLLLLSLNGVNSYKILVYNNLFGHSHIKFVAAVADTLTDAGHDVTVLMPVIDESQRNKTALKSTTRQIFIDADEEVAEMVGKTDEFLSSLWTSETSNPIKMWWKSGHLINLFGKQCNKVMKSKEILDQLRDEQFDIAITEPFDSCGYGIIEYLQIPAHVSVLSCARMDHVSDAIGQLIAPSYVPSTQSVYGDRMTMYERMMNFLQYLYGRDMFSAIGDFEAENAKAILGIKRTWREILPESAFLLTNNIQILEFPAPSLDKIVSIGGLTVNTNKEALKLEHYFDTMVSMRQKNVIISFGSVIKSKDMPDEYKKTLVQLFELMPEVTFIWKYEDLADKKHTCGVLNINRVEWIPQNELLADSRVDAFITHGGLASVTELAMMGKPALVIPIFADQTRNAEMLKRHGGVEVLHKTDLANAKKLEKALRKLIYDPSYKKNAQHLAERLQNRPTNAKEVLVRHVEFAAKFKKLPLMDPYGRHMTFIEYYLLDIMAITAAVVTVVVYVVFTAFRFVIRKCCGPKKVKFE

SEQ ID NO: 6957 - protein, 518 aa, Photinus pyralis
TSLILNPMFSIMSVFIILLWWILRSDGARILAIIPTPSFSHNTALQPLWRELSLRGHSVTLLTAEPIGDPQLVNLTEVDLSFSYKTMLKNLQEKIYTNRLEMYKFGYLRHAEVCDEQLGHPALQAIIRNESEWFDLLITESSRLPVLAFAHRFRCPSIGVTVLDVYPTMHSLLGDPTHPLVYPDIWLGLGDCTSIVGRIRCVLYDLGTSLLQTRVLFPLYDQMIEKHFGEGYPPIGELVKGISIQFVNTDPVLHKVRPLVPGVIQVGGTLHRLSRDPLRQDLRSVLDKATNGFIYFSLGSYAKSSSLPPKVLEVILETFAEIRYTVLWKFEDVLNKTENVITLKWVPQVDVLGHPNIKLFITHGGLQSINEAIHFGVPMVGMPIFADQQQNVHLIVSRGCGLSANYRNLDRAGFEKTINEVIDNSRYATAIKTLRDRVRDQPMTGLERAVWWTEYVLRHKGAGHLKSGAVDVAFYQYYLLDVLTIVIALFTLIIFGFYFVLASFFRIIRLSCYFLCKN

SEQ ID NO: 6958 - protein, 533 aa, Toxocara canis
MSRNISIIGGRLKPFQLSENDSIGCQELLVRLSKPMIFINIGLAVFISLGIQASEILLGVMPQGKSHAGSFMPLLHELIQQGHNVTIYMDNYGMNTLGVRVNEWFINVTDHKDPYNDTDFSRGIWKNRFTFISQVKPFYYGALSCKNVLNDHRTDFERLVNYPWDLILTDSLFAVCAYGIAELSHAHHIVMHSTDVESGYGTSKGYARNYLMMPRYFLEFDYADVDITHFNDRFWSAYEWFGTWMTFATVSNSHMRNALSPVISNFDISKYYAESSMSFTDMPLHLYVPMATNNELFIYGAYCRSYRSLSGEIATFVDDHQSKGTILIAFGTIVDWSIAPNEKLNTFIEALNQLTDYRIIWAFNGKELPIKKHIKFVKWLPQNDILNHKRTKLFITHGGLKSIKEATCATVPMLIMPMFAEQVRNSWLTRHHGFGKMINKVNFTSASLVESIREMITNPDYKNNVKRLRRFYDDTPIPALKEAAFKINRLLKYGGRMPDYFYTRSTKLSFFTFLNIDLLVLFPALLIFLLSIR

SEQ ID NO: 6959 - protein, 418 aa, Dufourea novaeangliae
MASVACEAGLNHPDVKDLVKSGEQFDVVLTESFNTHCFFAVFHRVDAPFIEISTHQLMSWTVDELGISNEASYIPTLFSHVPRPMNFFQRTWNVVAMMIEWTVANTLFKWNAQSVAEKTHGPGMFDLKEKSRNVTLMFVNTHYTLHGAQPFPPNVIEVGGLHIPRKTNPLPQDIAKFLDDAHEGVLYFNLGSVVKMSTVPEDKLTILLNMFASIPRKVIWKWETDDLPHKPSNLLVKKWLPQFDIMNHPNVKCYFGHGGLLGLSEGVHTGIPMILMPLFGDQYQNAMAARARGVAIVLKYSELNERDLRHAVDEIFNNTRYRENARRLSKAYRDRPATPLETAVWWTEYIGRGNGVPYVRTAGANMSWCTRNLVDVYTFLFTVLLTIIYVLYRLAKYLLLVRKKSKDIDQRASTKKRD

SEQ ID NO: 6960 - protein, 322 aa, Caenorhabditis brenneri
MLGLTAYHFQFGLLFDKQYEQAMRLTGGKVRTWQEILQKSTFFLTNSNPYLSFTTPTISKVIQVGGCTIDTPKSTKLDEHFDQVLSLRKNTILVSFGTVIQSSDMPAHFKKGLVETFEKMPETTFIWKYEEDDKELKKKLPENVVLSKWVPQPALLADSRLDVFVTHGGLGSTMEVGYAGVPSVMIPIFSDQGVNAEMLSRHGGAVVYSKFDLPDSDKLVKTFRNILSNPDYKKNANRLSSILHHQPMDPKQILLNHCEFAARFGQVESLEPHANKYNFIKFYCLDSFALVVFVLSFVLIVIFKLLFFVYNQINMCFKLKRE

SEQ ID NO: 6961 - protein, 530 aa, Chinchilla lanigera
MAPARSPAPLPLYLCLLLASGFAQAGRLLVVPMDGSHWFTMRSVVEKLVQRGHEVVVVMPEVSWQLGQSLNFTVKTYSLSYTLEDLNRGFKEIIEGTWKTREDSLFSIIKGASKDFFELLFSQCRSLFNNKELVAYLKGASFDAVFLDPFDTCGVIVAKYFSLPSVIFTRGALCAYIEEATQCPSPLSYVPRNFLGFSSAMTFKQRVRNYISYLEEHLLCPYFLKKTLEIASELLQTPVTAYDLFSHTSIWLLRTDFVFDYPRPVMPNMVFVGGINCHEGRPLSKEFEAYVNASGEHGIVVFSLGSMVSEIPEKKAMAIAEGLGKIPQTVLWRYTGTPPSNLAKNTILVKWLPQNDLLGHPKTRAFITHAGSHGIYEGICNGVPMVMMPLFGDQMDNAKRMETRGAGVNLNVLEMTADDLEDALKKVIYDKSYKENIMRLSSLHKDRPIEPLDLAVFWVEFVMRHKGAPHLRPAAHDLTWYQYHSLDVIGFLLAIVLFVAFVAFKCCAYGFRKCFGKKGRGKKAHKSKTH

SEQ ID NO: 6962 - protein, 528 aa, Chaetura pelagica
MWRHQIQAGLLLFLSCWSLAEGGKLLVVPQDGSHWLSMRVVLERLWEKGHKIVAVVPEAALFLKSSQRFTIKTYSVPYTQEFVDKFYNSLGEYSFVNPPFLEKVYFVLKNISEVTSMFSSSCRSLLYDEELMKYLQDSKFDAVMVDPVLPCGPILAEHLSLPSVYFMRGLPCTLDYKATQCPSPYSYVPRSFTDNSDHMTFMERVKNLLIGFSEHLLCYVFYLNHENLASEFLHRDVAVLELFSKASIWLMRYDFVFEYPRPIMPNIVYIGGINCEQKQPLSKEFEAIVNASGEHGIVVFSLGSMVSDIPRERAKEIAKALGTVPQTVLWRYTGEVPPNLPKNVKLVKWLPQNDLLAHPKTRAFITHGGSHGVYEGICNAVPMVLMPLFGDQMDNAKRIESRGAGLTLNILEMTSEDISTALKAVINDKKYKDNIQRLSDLHLDRPIHPLDLAVHWVEFVMRHKGAPHLRPAAHDLNWIQYHSLDVMAFLLAVVLLSLFISLKCCLFCCRRCCCKKGRTKKATKAKSH

SEQ ID NO: 6963 - protein, 517 aa, Neodiprion lecontei
MALRTLFVIIMTVCLTDGARILGIFPYQGKSHNVMFEPLMIGLAKAGHTVDLVSHFPLKKPVPGLNHISLKGSLHSYVNNVTASLARGYNGIYGMVHSVSVKSALDLCNLMRLPQLQNIINTDTKYDIMVTQVFGSNCYLAVAHKLKIPVVGVVTSVIYPWSYGPFFGDANPSFIPSQLGTFTNEMSFVERVQNTIEHYYAKFLFHYYDRTVSDPLAKKYFDDLPPLNDLYNNMSLLLVNSHLSIHGVRPGNPAIVEVGGLHIDTTQVLSEELEKYLNSSKDGVVYFCMGTMVRSDTFAQEKILAIYESFSALSNYNILWKSNAEDLPKPFPSNLKVIPWAPQYAVLNHPKVKAFVTHGGLMGTLEAVHAGVPMIGIPFFGDQAFNVLGYVHRGFAVHIDYDDINQLTFSKALNEVLTNPMYQSNAARYSRLFKDRPLSPLDEAVFWIEYIIRNGGEPLRSSALHLYWFQYYLIDVILFLLAVPTLFLLSLFHVLKRVLRTNKGTKTRTIQKKKKTS

SEQ ID NO: 6964 - protein, 539 aa, Megachile rotundata
MKLCIILLCTLAICHGYKILGIFPFHGKSHFVMFEELMKALARKGHQVDVISTFPLKRPYANYTDIVKIQAPEQLLNNLTFDGVAVFTSAEAGYIVASMLGNPLCEHLGSPEIQRLLNPGENRYDVVIVEIFGAHCFAAVGHVLNVPIIGVSSSALYPWAYEYIANPENLAFAPNILLSYMENMNFFQRLYNFLHHKYNVHVFRQASSIQTEMIRKYVSPDLPDIRELEKKLAMILVNSHSSWNGIRPSTPALIEVGGLHVQEEGVELPPSLEKWMNESKDGFIYFSFGSMVKIESFPAKYLKIFYSSLGKIAPVRVLMKIAKSEELPPGLPKNVHTLSWIPQVKVLKHPNIKAFITHGGLMGTQEAIHYGVPMIGIPLFADQFINIDVGTVKNITIGLNLDTLTEERMDEALNAVLNDPKYRNAAKKLSERFLDRPLNASETAVYWVEYIAKHGADALRSPAVDLAWWQRELLDVYAFLLVALLISLYALTVVVRFVFQLVNANDSAAHKKKDEYNATYIVINGSVHSKNISKQSGNR

SEQ ID NO: 6965 - protein, 720 aa, Papilio machaon
MLRRYFGAAVPRIAELNNNIHMLLLATNPIWAGNTPVPPNVIFIGGIHENPDEKLSEDLKYFLDNSKNGVIYASFGSNVKTNKISAKITRILAHVFTESTLNVIWKLDQNELPKQSDHIKIMKWLPQAALLRHPNVKLFITQGGLQSTEEAITAGVPLIGIPILADQWYNTEQYVHFNIGVKLNYDTLNKKQLQESIYRLTLDDSYRKNVVKLRQQILDQPQKPLERAVWWTEYVLRNGGRHLRSPSANKSWISLELELLFFLTIGQAPRNIIEIDVRNESYAVMNETTKEAYKNDTSSFRKVELLSQLFVRAFRAQLENEEFRAVVKLDEDYFDLLLIEACATPTLGLSHIFKAPVIQVSSLGALMSNYEALGIPMHLFFFPTSVRKRIHKLSLTEKLATLLEFAVSKYVMRTTRNLENDLLREHFGEDTPSLDELTNNIDMLFLNTNPLWANNYPVPPNVIFIGGIVENARKDLPKDLEAWLNSSKNGVIYVSFGSNVSNKTFSQKTKHVLSNVLSNLPYDVLLKWDEDKLIKKSKNIKIAKWFPQVDLLYHPKIKLFITQGGLQSTDEAIAAGVPMIGIPIFVDQAYNTEQYEHFNIGVKLNYNELSEEKFKRAIDTVIGDDKYRENIVKLRNIINDQPQSPLDKAIWWTEYVIRNKGAQHLKSPTANISWIKYLEIELIAIVTAIFLLFIILLISIVKFLVRIINGIFRKFKVKRE

SEQ ID NO: 6966 - protein, 225 aa, Vanessa tameamea
MSFGTNVKPSLLPKEKIQIFTNVFSELPYDVLWKWDKDEIPGRSKNVRISKWFPQSDLLKHPKVKLFITQGGLQSTDEALTAGVPLIGVPMLGDQWFNVELYVKHNIGMKLDIETLTEEKLKEAIETIITNKSFRENVVKLRNIMRDQPLSSLERAVWWTEYVLRHEGATHLRTAAANIHWTEYYALDLVLFLLSSFVILLLILTFIIRKTLLKLKYTRIKRKMN

SEQ ID NO: 6967 - protein, 616 aa, Trachymyrmex septentrionalis
MRKTHSFIVFSLIIVFSTCCLAVNQTFVNPMQTKFKILGVFGHPGKSHFDVFKPLLEELARRGHELTVISYFPRTDNAKVKEPLPNYKDVSLVTAKDGIFVNVVDLHQINHGWFRPMLDLHMLRFMADYACSTGLRSSSVKKFLQSDEKFDLILTENFNTDCFLGFIHRFKAPYMALSSHQIMPWTNSDMANTDNPSYIPVILLGLTKPLDFFSRIKNALWLLLSKAIYEYYFRSVDQVVANEVFGTDLPKLKEIALQSQALLVNTHSSIHGSRPQLPNVIEIGGLHIPSRVNPLPKDVAEFLDSAHEGVLYFNLGSMIKMSSIPQEKLNAILKVIGSIPRKVIWKWEADKLPRKLDNVMARKWLPQFDIMTRREKVVGEEAFRYSVLSARRTIERENCVIGCDAGFRCLTHLLLVRVRYSSDSCSPIFIIILLLCTKYYHRNVKCYLGHGGLLGLSESVYVGLPMILVPMYGDQFHNSAAAETRGTAVVLAYDNLTEETLRSALDKVFNDTSYHENAQRLSKAYRDRPATPMETAIWWTEYIARGNGRFYFRSDSTGLSWYQRHLVDITLVLIIVSIIFIYILFRLVKLLLLLLRFFKRTSRNQVEEKRKLKKDN

SEQ ID NO: 6968 - protein, 418 aa, Vanessa tameamea
MELARNISRDLIATPEVREVLLKEKFDAVVTEWFFSDTNSGYAAVQQVPWILLNSMVMHTHMESLVDTVRSVPTIPAFFIDSPIPMNFWSRLQNTLLYLLMSTGSLLDYSMLKSDYETYFSPFAKARGVTLPPYNEAIHDISVLFVNSHPSFSPAQSLPPNVVEIGGYHIPEEIPPLPKDLQDILDSSPQGVVLFSMGSIIKSVALAEHTRRDLIKVFGELPYTVLWKFDENIEGLPKNIHIRSWMPQTSILAHKNVKLFITHGGLLSTLESLRFGVPIIAIPVFGDQPSNAQKSVQGGHALMIDFSPEMGGPLKDALKEMLSNDRYYKRAKYLSQLFVDRPVNTTHLIQHYVRHAIETNGAHHLRSKALLYSWYELWMLDQVAFLLVILYTIYRVFKKIVGCFKRHKSIKTGKEKRH

SEQ ID NO: 6969 - protein, 1038 aa, Bicyclus anynana
MYKLFKLFCIISLIGKIEPAKILAVFPVASISHQVVFRPLMHELAKRGHEVVVITPDPAYPKGQSPQNLTEIDIHDLSYKIWNDLLETGMGQNRITSVEMRMFLGLMTKAFEAQMKSEDVQKLLKDKSKSFDLLFTESCVRPAISFGYRYNVPIIEFSSLGSIFGSIYGTGVPTNYLVYPSPLRTRVYNLSLWEKISAVYNDYKIDKVIEEHKEEENKVVRGLFGPNVPDLSELKKNVHLMFLNVNPIWDFNRPVPPNIIYLGGIHQNLHKDLPKDIKSYLDSSQNGVIYMSFGTNARPSLLPVETLKVFTNVFSELPYDVLCKWDKEELPNRPENVRVSKWLPQSDLLKHPNVKLFITQGGLQSTDEALNAGVPLVAIPFLGDQWFNAEQYEKLNIGIHLDLETITEKKLKNAIEKTIQDKTYRENVVKLHSLMRDQPQTPLERAVWWTEYVLRHGGATHLRAAGAHMHWTEYYAIDVVMLLVFGVLAILIVIIITITRLAMQLKDFKIKMKISDITNQTMYYLLKILCVINVIKAMESARILAVYPAASISHQVVFRPLMHELAKRGHEVVVITTDPAYPKGKAPQNLTEIDLHDLSYKAWNDILETEIARNRLTSVEVKIFLHVMIKTFEAQVMSEDVQKLLQDKSKSFDLLFVESCVRPALSFGHRYNVPIIEFSSLGNLLGSVYGTGAPTNYLVYPSSLRSRVYDLSLWEKISAVYSDYSIDRVLEEYEEEQNKVIRGLFGSNTPTLSELKKNVHLIFLNVNPIWDFNRPVPPNIIYLGGIHQKPNQELPKDIKTYLDSSQNGVIYLSFGTNARPSLLPTETLKIFTNVFSQLPYDIICRWDKEEIPNRPQNVRVSKWLPQSDILKHPNVKLFITQGGLQSTDEALMAGVPLVVIPFLGDQFFNAEHYVKLNIGIRVDLETITEDKLKHAIENAISNKTYRENVVKLHNIMRDQPQTPLERAVWWTEYVLRHGGATHLRAAAAHMHWTEYYAMDLIITVLAAFVILIVVIVLAIRFLLFKLQLRSLKFKIKIN

SEQ ID NO: 6970 - protein, 521 aa, Acyrthosiphon pisum
MAFESKKMYLPLFSILIYTFAGSWIPAAPAEGARILAVETVGGKSHWNFMSAILRALVDNGHNVTVFTPFTDGNRENYTEVSTSTEATVLLDGELEDLIDKYGDPIKIVGQMAKMSRHFCDVVYQNSKMIEVLANKRSDFDIVLIESLYSECVSYVAVKLNLPLIYVLPIPTMDITSRLFTGHMSNPAVVSTSMARFSVPKTFVQRSANIAFLIYASIVYKISELILMYNEPREYDLHAPIPPSLVFVNRHFTIEPASPIPSNVVEIGGIHLKATKKLPKDILEFIEQSPHGVVYFTFGSTVKMTSLPEHIKKAFMDALAQIPQRVLWKYEDEMENIPKNVMVKKWLPQREILLHPNVKLFISHGGISGLYEAIDGGVPVLGFPLFADQPKNIDSLVNAGMAISMDILSVTKDAFLKNVLELINNEKYKENGKTASKIFRDRPMSPASLVVYWTEYVLRHKGAPHLTSHAINLSWYQYYMLDLIAFILVFIIFVVFVSYRIFKSISKYFSSYSRNIKSKSE

SEQ ID NO: 6971 - protein, 491 aa, Lingula anatina
MASKAVLSLAVLYVLLLRSSTSDGGRILSLVYPGKSLLSLTVTVLTELKSRGHDVWAVYADTFEISASMLRESGINLLTFTSKEKMFLDDPEVQRDILMAAVENPELRTSLFHLTSTIQKFTSIFESYLEEMFVDKELDRKVRELKFDLMIVCGYWFFAKAYLFPHRYAVPYVSIVLDMQQLAGVPMLPSFVPSLAITAKYSDKMSLPQRMLNIVPYVLLKHSIQPITPELSQKHAPGRPYMSTPELMAESELWIVDGGQPAIDHVKPSLPNVKYLGGLVTRPAKPLPKDLETFLKKHDHGVVLVSFGSLVKYMPDRVVQELFEAFKNVPYGVIWKYNGQPLKNVPDHVKIVSWMPQNDILGHPNTKLFITHAGNNGQMEALYHGVPMISIPLFGDQDYNAARAEQKGIAITMDAAFLKSEDLISAINMMMENETYAKNMRRASAIFRDQPGTPVELAGFWIDHVIKYGGSYMKSHARLLPWYQFYMLDVI

SEQ ID NO: 6972 - protein, 514 aa, Papilio xuthus
MLLIFIFVIYISSTQCARILAVFPTPSISHQIVFRPLTQELARRGHELIILTPNPAFPKGQAPKNIIEIDVHNESYAIKNQTTKEAYEKDTSSLKKVELLSQLFVRVFRVQLENEEFRTILKLDKDYFDLLLVEACVTPALGLSHIFKAPVIQVSSMGALMSNYEALGIPMHLFFFPSSVRKRSHNLSLTEKLSTLVEFAVSKYVMRKTRNLENNLLREHFGDNIPSLDELTNNIDMLFLNTNPLWANNYPVPSNVIFIGGMLQNARKDLPKDLEAWLNSSKNGVIYVSFGSNVSNKTFSHKTKHVLSNVLSNSPYDVLLKWDEDVLIKESKNIRIGKWFPQSDLLYHSKIKLFITQGGLQSTDEAIAAGVPMIGIPIFVDQAYNTEQYEHFNIGARLNYNELTEEKLKETIDTVIEDEKYRNNIIKLRKIINDQPQSPLDKAVWWTEYVIRNNGAQHLKSPTANISWIKYLEIELVATLTIILLSFITFLILTVKFLVRITIGMFRKLKVKRD

SEQ ID NO: 6973 - protein, 372 aa, Ancylostoma ceylanicum
MHAAQEREEVGWNKRVAEALAQAGHDVTVILVQTMEDAEKDVQFSKDVKVHALNASSGITRSDMEDFQKKAVFGKSQFRAKLRMSLTVTLQNKEFMQWLTDQKFDLAFVHMYHTCPIGLVHASKIPSWIWLNSGQLMDNVANAIGVPTPPSYVPREIVVNKETQIFREHWDPEFPDIMDLIKKCPLVMVNSNELYELPRPTLAKVINIGGIGVEYKDAKPLEGEFKKIAESGKGIVVMSFGSVAHAELMPEHWKTAFLKAFAHFPDYEIVIRYGSDDLKDRLPPNVHAHRWLPQADLLLHPNTKVFISHGGYNSLQESINSGVPLVTIALFGDQFKNSKIAAKHGFAVNLKKGTLDEASIVAALKEVLNNEK

SEQ ID NO: 6974 - protein, 342 aa, Pieris rapae
MKEKRIKFGDKAGMFKVTEDVATLLGMVIEEQLKTDGVQQLINDKSKKYDLIIIEACARPAIMFSHLYKAPVIAISSFGMAFGGGHLVGAPTHPILYPNMLHQRLHNLTFWEKFNEFYKHYWIVNMWKSIENKEFRLLKKYFGGDDVLSYEEINKNVDMMFLNIHSMWSHNQPLPPNVISIWGIHKSPPKSLPQDLQAFLDSSKNGVIYISFGSNAPSSMLPPEKIEILINVFSKLPYNVLWKWETDVLPGKSKNIKIAKWLPQSDLLRHPNIKLFITQGGLQSTDEAMNAGVPLIGIPMLGDQWYNVELYEYHKIGVRIELETITEEQLTTVIKTVTNDKR

SEQ ID NO: 6975 - protein, 530 aa, Canis lupus familiaris
MAATILTGFPLLCVCLLLTSGFAEAGKLLVVPMDGSHWFTMRLVVEQLIQRGHELVLIIPEVSWQLGKSSNFTVKTYSTTYNLEELNQMFKNFSYSQWKTQQQSSLFLVLSPLKDSLEHLFLHCKNLFSDPKLVEYIKESSFDAVFLDPFDVCGLIVAKYFSLPSVVFTRGLFCHFFEESTQCPSPLSYVPRPFSMLSDAMSFRERVRNHIFHLEEHLFCHYFLKTPLEVASEILQTAVTPYDLYSHTSIWLLRADFVLDYPKPVMPNMVFIGGINCQEGKTLPKEFEAYVNASGEHGIVVFSLGSMVSDIPEKKAMEIADALGKIPQTVLWRYTGTPPPNLSKNTILVKWLPQNDLLGHPKARAFITHSGSHGIYEGICNGVPMVMLPLFGDQMDNAKRMETRGAGVTLNVLEMTSADLANALKAVINDKSYKENIMHLSRLHKDRPIEPLDLAVFWVEFVMRHKGAPHLRPAAHDLTWYQYHSLDVIGFLLAVVLGVVFITYKCCAFGCRKCFGKKGRVKKPHKSKAH

SEQ ID NO: 6976 - protein, 454 aa, Zootermopsis nevadensis
MSLPWLVTLVLLLLVTQSHGARILGLYPLPSRSHLIVQNALMFELASRGHQVTVVSPFPVKEPIPNYTHITVESDMNDLMGGHVSSNVFDMQSIGPLKMTFFMWLMGEALCDHVLQNDNIQKLIHSKDLHFDLVIVEVFINECVLGFAHKFNAPIIQVCTYGGGNFMADWVGSPNPYSYVPDEFLPYEDKMNFWERMYNTVVGTLRHVGRQLIHVPKQNAVMQKYFNYTDKFPPVWELEYRTSLVLLNSHFSLSYPKPLSPNYVQVGGMHVKPPKKLPQELQKYLDEAPHGVIYFSMGSTLQSSELPESIRKAFLEAFSKFKQRVLWKWETDSLPGQPKNVRLGKWLPQSDILAHPNVRLFITHGGLLSMQEAIYRGVPLLGIPIFGDQGLNMGRAVSAGYGLKIDFVNVTTESLTWAIREIIETPTYVLTFLHFLLSFLLLLLLLLLLLPYQW

SEQ ID NO: 6977 - protein, 215 aa, Cyprinus carpio
KATVNKFCICVFAQVVWRYNGKMPETLAPNTKLYDWIPQNDLLGHPKTKAFITHGGTNGLYEAIYHGVPMVGLPLWGDQPDNLLHMKTKGAAVVLDISSMQSKDLVDALKTVVNNPSYKESIMRLSRIHHDQPMKPLDRAVYWIEFVMRHKGAKHLRVQAHDLSWYQYHCLDVVAFLLSIIALITFLFIKTCQCLFRKCFRNTRPDDKAQKSKKE

SEQ ID NO: 6978 - protein, 513 aa, Photinus pyralis
MWILHWLVGMVVADIVISSKILGIIPTPSYSHQVVFQALWRELSLRGHQVTTITTHPLKDPALTNLTEIDLHFSTELWKKGVAENIFDYKSNPIGSLIKMMSSVFEIQEQQMRHEGVRQLLESEQEFDLAIIEAHATVSHAFVARFNCPHIGMLSYDAPGWLYETIGNPTHPVLYPHDFFDFYEHLPFLQRITSVISDAAFKLMIWYSYPYLDQLVRQYFGPNYPPLKSIMDNTSMLFVNTDPVFYKVRPLMPVVIQIGSGTHIQAPRPLPKELKVMLDNATNGFIYFALGSNVESRGIPLETRRVIIETFSELPYTVLWKFESDLPNKPENVFTSKWIPQQDVLRHPNIKLFITQGGMQSSEEALYSGVPIIGMPFFGDQFGNIGKMVHMGMGLSVDFENLNKGEFKSKILEVIQNPMYRTNVEKVANLARDQPLTGLERAVWWSEYVIRHKGAKHLRSPMLDVPWYQYLLLDVLGVLLLCLGLSLFIAYKFTKGVFRLVFRRFVNYKKKIQ

SEQ ID NO: 6979 - protein, 350 aa, Peromyscus maniculatus
LQNICCYFFYRSNHHTNIKIFEYFVDLCSHLLSRKDIMDSLRKKKFDLLFLDATDPCVFLIAEKLGKQFVAFLPVLFSIIDYGVPNPLSFVPGFGSSLTDQMDFWARVKYFLMFLDSSMKQREILSQYDGIIQEHFAEGSRPVLSELPRKAELWFVSSDFALDFAHPMFPNIIYVGGLTDKPVRPIPPDLEDFIIKFGESGFVLVALGSTATMYQTKELITEMNSAFARLSQGVLWTCKDAHWPKDVRMAPNVKIMDWLPQTDLLAYPRIRLFVTHGGMNSIMEAIQHGVPMVGIPFFGDQAKNMVVIEAKKIGVSVQLETLKAETFARTLKEVIEDKRYAALWGWGLLG

SEQ ID NO: 6980 - protein, 533 aa, Bos mutus
MTAGSQGDRPVILLLLLWALGPSVSQGGKLLVVPVDGSHWLSLVGPLQPLQQKGHDIVVLAPDASIYIKEEAFYTLKRYPVPFRREDLEETFISLGRTVFEDDPFLKRVIKTYQKIKKDSALLLSACSHLLHNKELMASLTASSFDAVLTDPFLPCGPIVAQYLSVPAVFFLNGLPCSLDFQGTQSPSPPSYVPRYLSFNSDHMTFLQRVKNMFITLSESLLCDMVYSPYGLLASEILQKDMTVRDLMSFGSVWILRSDFVFNFPRPIMPNIVFVGGINCASKKPLSQEFEAYVNASGEHGIVVFSLGSMVSEIPEQKAMEIADALGKIPQTVLWRYTGTPPPNLAKNTKLVKWLPQNDLLGHPKTRAFITHSGSHGIYEGICNGVPMVMMPLFGDQMDNAKRMETRGAGVTLNVLEMSSEDLEKALKAVINEKTYKENIMRLSRLHKDRPIEPLDLAVFWVEFVMRHKGASHLRPAAHDLTWYQYHSLDVIGFLLAVTLTVIFITFKACAFAFRKCFGKKERVKKSHKSKTH

SEQ ID NO: 6981 - protein, 532 aa, Fukomys damarensis
MAGPLPAFPRVSAGLFFLALWGLVVGDKLLVVPLDGSHWLSMKDILERLGDRGHEIVVLVPEINLLLKESKHYTRKIYPVNYSREELEERFRSFGNHHFMDRPYVTAALTEYRNTMIVIDMWFFNCQSLLKDSDTLNFLRESKFDALFTDPGLPCGVILAEYLQLPSVYLFRGFPCSLEHVFSNSPNPPSYIPRCYTEFSDHMTFPQRVVNFLVSFLENLIFHCLYSRYEDLALDLLKRDVRLPSLFQKDPVWLLRYDFVLEYPRPVLPNMVFIGGTNCKKIGALSQEFEAYINASGEHGIVVFSLGSMVSEIPEKKAMAIAGGLGQIPQTVLWRYTGTPPSNLAKNTILVKWLPQNDLLGHPKTRAFITHSGSHGIYEGICNGVPMVMMPLFGDQMDNAKRMETRGAGVTLNVLEMTSDDLGNALKKVIYEKSYKENIMRLSSLHKDRPIEPLDLAVFWVEFVMRHKGAPHLRPAAHDLTWYQYHSLDVIGFLLAIVLLVAFVAFKCCAYGFRKCFGKKGRVKKTQKSKTH

SEQ ID NO: 6982 - protein, 533 aa, Octodon degus
MAMASLVPRLLFLGFLVCALRPLGSHAGKLLVVPVEGSHWLSMVGVIQRLQQNGHEIVVVAPEALLYIKEDPSYTLKKYPVPFQKEDVEASFNELGHHVFESLPFLQRMLKTYKKVKRDSALLLSGCSHLVHNKELMASLVESNFDMVLTDPFLPCGPIVAQLLALPAVFFLNALPCGLHFEGTQCPNPMSYVPRSMSTNPDHMTFLQRVKNVLFVLTEKVMCNVVYSPYALLASEILQREVTVQELLASASIWLLRIDFTADFPKPIMPNMVFIGGVNCLHRNPLSQEFEAYVNASGEHGVVVFSLGSMVSEIPEKKAMAIAEGLGRIPQTVLWRYTGTPPSNLAKNTILVKWLPQNDLLGHPKTRAFITHAGSHGIYEGICNGVPMVMMPLFGDQMDNAKRMETRGAGVTLNVLEMTSDDLEGALKKVIYDKSYKENILRLSSLHKDRPIEPLDLAVFWVEFVMRHKGAPHLRPAAHDLTWYQYHSLDVIGFLLAIVLVVAFITFKCCAYGFRKCFGKKGRGKKTHKSKTH

SEQ ID NO: 6983 - protein, 489 aa, Anopheles darlingi
MTQRLSMRCVLLIAVIAATLQSGTNGARILSVNVFPGRSHWQMISAILEELLARGHEVTVITNYARKTPHPNYTEIVISPIYDFWGKSVKVDSLYDLTEISIHSMLMNFLYPLGLETAEYAFTRDNVMHFLRHDNTKFDLLLAEQFYQESYLMLAHKYKVPIVSIGTFGFGHYMGPLMGQMNVWSHVPHEFLPFTDRMSFTQRAYNSLVSFYESILRHWYYMPRQEAMAAKYFSFLPGPLPLVADLERQVSVILLNSYTPLTTTRARVPGLVPVGGLHIKEPKRLPADLQTFIDEAEHGVIYFSLGTNLRSADLPPEKLAIILRVFGSMKQRVVWKFEDERIENLPANVLVRSWLPQSDILGHRNVKVFITHGGLLGTQEGVHRAVPMVGIPIYCDQHLNMNKATLGGYAVKLYFPNITETSLRGALEEVLYNPSYKENVQRVSQIFRDRPVPALQEAIYWIEYVERYKGAPQLRSAGLDLPWSVAGNL

SEQ ID NO: 6984 - protein, 513 aa, Helicoverpa armigera
MMSLALFIFVLSITCNDAARILAVFPVPSISHQVVFRPLTQELARRGHEVTVITPDPVFTNGGAPANLTEIDVHFTYEDWKKFYETTSGDDNDLVKQMEIAFDLINRIFEVQMRVDKVQKILKEQKFDLLLLEACARPALILSHVFKVPVILVSSFGPLIYNSETIGSAMHPLLYPVNFSQRTNNLSKWDKLVELWRLYRIMNVMQQGELEEQVMGKRLFGPDIPPISELKNNVDMMFLNIHPLWDTNRPVPPSVIYMGGLHQKPQKELPTDLKTYLDSSKNGVVYISFGTNVQPSLLPPEKVRILVKVFSELPYDVLWKWDKDELPGRTSNIRISKWLPQSDLLRHPRIKVFITQGGLQSTDEAITAGVPLIGVPMLGDQWYNVEKYVQHEIGVRLDIETLTEEQFKNAITQVIGDKKYRQNIKKFGQIIRDTPIDPLENAVWWTEHVLRHGGARHLRSPAANMSWAEYLELELVITVLSVALGFVLLLSFLLYYSYKHFVLSPEQKKLKDN

SEQ ID NO: 6985 - protein, 519 aa, Halyomorpha halys
MKWLLLLFLTGTLYVEVSPKRILAFFPLIAKSHHYVFRPIIEELTKRGHEIVYVTGYAYEKGPPKGVTQIDIKKYLPFREAEGNVTALIGASAFDSTARFYKFGVKLSHMILSSPPVKELIHSKAKFDAVLMESYAVQEYQSAFIHKFGCVGIEIIPLGDFSWMNEIAGLPSNPSYQLDFKSEATQDMNFIQRLYNTYVVTITTLISYYQQFEMQRIVDQYFTYPGWETRPPLSQLLANRSLILSNSHFAIGYPSPLTSHRKEIGGVNILPNKPLSKDLQKYMDESTDGVIYFSLGSNINVSDPLNEHITQVFINTFRELPYKVLMKWEIEYTGTPPPPNVKLEKWFPQQDILAHKNCILFITHGGLLSLMEAVHFGVPVIGIPFFGDQAKNFFFAEEAGIGKMIRLEEITYERVSNTIKEVLSNKSYKNEIMKKSKIFRDRPEEPVKTAVYWIEHAMKYPNVLTPKSASLSYVQLHLLDVKLFLGTVLLTALYIIWKLLASISRLFKGKPAVRKAKRS

SEQ ID NO: 6986 - protein, 473 aa, Cyprinus carpio
MRLIVCFLSLLAVLGPAECGNVLVWFSDGSHWINLKIVLETLIERGHSVTVLVPDASLFMKAKESDHFSYQPFNASMDEQEVRNFIEEFVYFSVYETDQLNLLQLLMKVYKFASIIQDMSISYCDGILKSPELMDKLRNGMFDIVLSDPMYPCSDIVAEELNVPLVYTFRLSIANVLERMCGRPTSYCEMMGKADIWLIRIYWDFEFPRPFLPNFKYVGGLHCSPAKPLPKDMEEFVQSSGDDGIVVFTLGSLVDKMPKELSNKIATALAQIPQKVLWRYGGEKPDTLGENTRIYKWIPQNDLLGHSKTRAFITHGGTNGIYEAIYHGVPMVGIPLFGDQPDNLVHIKARGAAVRLDNIKTMEPQDLVNGLNTIINNSSYKENAMRLSRIHHDRPVKPLDEAVFWIEFVMRNKGAKHLRVEAHNLTWYQYHCLDVFAFLITILTVVLYVFFIMCKFFIMRCCFRSKNKKSKKE

SEQ ID NO: 6987 - protein, 1887 aa, Blattella germanica
MTSLMSLHSLHGERILALMNLASPSHYIFNRALLVVVASPNKEQKTVPNLSFIFLEKIYDTERYTRDLEELVFWSMWYKTFATFKWGSSMCDKQLNTSGAQTLLNYSSSEKFDLIITEVGWGECFFGFIHKFGYPPVIATSAVGIPPWLSYTMSNPENPSYMPTFLLSYTDHMTLSQRLHNFIINNFVQLVYMYYHIPLQETIARKHFDGHLPAFEEITKNFSIVLVNTVFGLDSARPLLPNIIPIGGMHIKTHPEALPQRKALLEAFSELPQRIVWKFESDSLPGLPSNVKIAKWLPQSDILAHPNIRMFITHCGMMSTMEAAYWGVPIVGVPFFLDQSVNLKKFITKGAGLELDYVTLTKENALKAVTVITPDKEKTPIPNYKLIQLENIYRDIKAVYDYEEFTQWSMWQLTFGLFDWGSMICEMELNSTGAQTLLNYPSSEKFDLIITEVGWGECFFGFIHKFGNPPVVATSGVGVAPWLSYILANPEQPSYIPNFLLGYKDHMTFTQRVYNFIIHNFVDWIYKYYHLPKQESVAKKFFKEEMPPFYDIAKNFSIVLVNTAFGLDNPRPLLPNIIPIGGMHVKTKPDPLPKDIQKFLDEAKDGFIYFSLGSNIQSEGLPEKRRKALLEAFAELPLRILWKFEADDLPGLPPNVKIGKWLPQSGILESSYWGVPIVGVPFFLDQNVNLEKFIARGGGVRLDYITMTKETILKAVRTVLDNDRIDNSVIMTSRLWMWVTLLSLASYHSTNGAKILALMNLVSPSHYIFNRALLIALAERGHNVTVITPDHEKKPIPNYTLIQTENIYSDARDSYDYEEMALWNMWDFGFALYEWGAFMCDKQLNTTGGQTLLNYPSTEKFDLIITEGGWGECFFGFIHKFGYPPVVATSGLGVPHFLSQTLANPENPSYVPNYLSSYTDHMTFGERLHNSILQLYVDWLYRYYNLPLQEAIAKKHFKEEMPPFIDIASNISVFLVNIAFGLDLSRPLLPNVIPIGGMHLKSRPDPLPKDLQQFLDEAKDGFIFFSLGSNLRSENLPEGKRKALLDAFAELPQRVLWKFEADDLPGLPPNLSEKHEETLRNIQGSTTDCTGQSYFLDRIRHQTWRSSPFAFCCWRPLLLVRMASFSFKWMLLLLSITNEHCANGAKILALMNVASPSHYIFNRALLLGLAERGHQVTVISPDNEKKPVPNYTVIQAENIYSDARDSYDYEEMALWNMWDLTFALYEWGAVLCDKQLNTTGGQTLLNYPSTEKFDLIITEGGWGECFFGFIHKFGYPPVVATFGVGVPHFLSQTLANPENPSYMPNYLLSYTDHMTILERLHNFIMQMFVDLIYRYYNLPLHESMAKKYFKDEMPPFIDIASNYSIVLVNTAFGLDISRPLLPNVIPIGGMHVKTKPDPLPKDIKQFLDEAKDGFIYFSLGTNLKSEALPAVKRKALLDAFAELPQRVLWKFESDNLPGLPPNVKIGKWLPQSGILAHPNIRLFITHCGMMSTMESSYWGVPIVGVPFFFDQKVNMQKFVSKGGGVWLDYTTLTKESILKAIRTITQNESIELLTDSTEKMSCSLIWMFLILSLTNYQSASGAKILALMNIASPSHYIFNRALLVTVISPDNEKKPIPNYTVIQTENIYSDARDSYDYEEMALWNMWDLTFALYEWGAVMCDKQLNTTGGQTLLNYPSTEKFDLIITEGGWGECFFGFIHKFGYPPVVATTGTGVPHYLFHTLANPENPSYIPNLLLSYSDHMTFGQRLHNFIIQVFSDWVYINHNLPLQESIAKKYFKDELPPFIDIASNYSLVLANFAFGLDISRPLLPNVIPIGGMHDLKQFLDGAKDGFIYFSLGSNLKSDALPAAKRKALLDAFAELPQRVLWKFESDDLPGLPPNEGNVNNI

SEQ ID NO: 6988 - protein, 427 aa, Acromyrmex echinatior
MRMLLVIFPLLFCLSICHGYRFLGMFPFHGKSHFVMIEQLMKGLAKKGHQVDIVSKFPLKKPYPNYTDIVILPTDVHLVNNVTFEIMHQMLSSNPINVVSTWAGNELCELLGNPEIKELAKPKDPPYDAVFIEVFGAQCYSVFAYTLKVPLIGISTTSLYPWLYDMIAQPENLAFVPNNVRSFIEPMNFWQRLCNVVHTFFDKWHFNYLTTREQDRIIREHFGPDIPSVRELEKKISLVLINSHIALNGIQPRTAAAIDVGGIHVQDGNETLQPELEKWMNDSKDGFIYFTFGSMVMIETFPREFLRILYASLSKLAPMRVIMKIPKPEKLPAGLPENIYTSPWMPQIKILKHPNIKAFITHGGLMGTLEAIVCGVPMIGIPLFADQFTNIDRYVARNVALRLNIDTITEKSFDATLNAILRDPLYR

SEQ ID NO: 6989 - protein, 518 aa, Trichoplusia ni
MRALVYLVLSYICIANEAAKILVVVPTPSISHQVVFRPLTQELVKRGHDVTVITTDPIYSEGTAPANLTEIDLHDISYNIFRQEMAKMPKGNKDVMLLQTEIYFKICVSVFREQLKDKSVQQLIKNKNLKFDLLILEATFRQALVFSHIFKAPVIQMSSLGGVFDNFVTIGAPTHPILYPTIIRQKLNNLTMWEKVTELYNHYMSERIFQNNANLENELIREHFGPEVPTVTELYDNVDMLFLNVYPVFEGIRPVPPSVIYTGGLHQNPEKELPKDLKSYLDSSKNGVIYISFGTNTDPTLLSPERIQVLLKAFAQLSYDVLWKWNGDELPGRTENIRISKWLPQSDLLRHPKIKVFVTQGGLQSTDEAITAGVPLIGIPMVGDQWFNVEKYVQHNIGVRLDFEDLTADTFKNTLLKVIEDDSYRRNIIKLRSLMRDEVQTPLERAVWWTEYVLRHGGAKHLRSPAANISWAEYLELELVLTILAALLTAISLVLSAIYLLYKYFVRNYVAVMKIKSS

SEQ ID NO: 6990 - protein, 425 aa, Lingula anatina
  MOD_RES (417)..(417): Any amino acid
MASKTGMSLAVLYVLLLCSSTSDGARILSLVYPGRSQLGLTVTVLSELKSRGHDVWAVFADTFEISASMLRESGINLLTFRSKEKMFLDDPEVQRDILMAAVENPELRTSLFHITSAIQKMSRIFESYLEEMFVDKELDRKHSLQPITPELSKKHAPGRPYMSTPELMAESELWIVNGGQPAIDHVKPSMPNVMYLGGLMTRPAKPLPKDLETFLKKHGHGVVLVSFGSVIKYMPDRVVQELFEAFKNVPYGVIWKYNGPPLKNVPDHVKIVSWMPQNDILGHPNTKLFITHAGNNGQMEALYHGVPMISIPLFGDQDYNAARAEQKGIAITMDAAFLKSEDLISAINMMMENETYAKNMRRASAIFRDQPGTPVELAGFWIDHVIKYGGSYMKSHARLLPWYQFYMLDVMLVFLAXLFCLLWIT

SEQ ID NO: 6991 - protein, 520 aa, Diabrotica virgifera
MNFSKCLLVFTCFLGCEGAKILGIIPTASYSHQITFHPLWRELALKGHNVTVITTDPLNNSSLANLKEIDLSEIYDLFTTIKFYEIISGDPIYFWRIALLLRKVCFELARLIIEHEEIKNIKNKQFDLVIAEAHFPSIVGFIGHFKCPWIGVSSMESGIQYNVAIGNPAHPVLNPDYNLPLENMENLNFIERLASLVYRVSYVFLINVYIFPTLAAIYKEVGWNAPPMVEVQNNISMLFVTTHPIFHNLRPLLPNTISIGTGMHFKEPQPLPQDLQKFLDDSKTGVIYFSLGSNVNSNLLTTEFKKAVVEAFAEVPHNVLLKMDGEIEGLSKNVMVRKWMPQQDILRHPNIKLFITQGGLQSLQESVVNGIPLIGIPFFGDQITNVNKMVKKGYGVKVDRRSMTKEILVAAIKQVMTNPSYKETAEAMGEIFKDEEIPSLQRAVYWTEYVIRHKGAKHLRSPGIGMPAWKYYMLDVMGFLAFVCLTIIIAIFLILRLFFRWLKYLVKGEAKKTRKTKKKD

SEQ ID NO: 6992 - protein, 534 aa, Caenorhabditis elegans
MRLGTFIFLLTFLFFECYSSKILIFNPIFGFSHVKFISKMADIIADHGHHVTLFQPYHIALKNLDGLVKNKNIEILNYHPTHYEELLKAEPQTFSFFWDSYLVGNPVIGAFLMPKLLGGEFKKTAMEVLSDQKLINELKDRKFDLVIAETFELTGFYLAHLLDVPCIPMMSAVRYPIFNDQFGQPSLLGHVPQIGSAVAGEAGFYDRLNDMFRFFFMGISQEQLNKYQNYFIEEAIGRPVPFWKDLVKQSPIYITNSNPYLDYAVPSTAAIVQVGGITMDLKKLKQVGELPEEYENILKERESTVLISFGSVIRSYEMPESFKAGLIKVFESLPDVTFIWKYEKDDLEFQKRLPKNVHLKKWIPQPSLLADKRVKLFITHGGLGSTMEVAYTGKPAIVVPIFGDQHHNAVMLARHGGAVAYDKFDLKNGEKLTAVVHEMISSTKYQENAEALQHVLFNQPIDPKMNFLNHLDFAIKFPNHRAQVPAINQLGFVAHYYLDVLLFLLVSSIVITYLAISLLKKVLGKCLTKKTKSD

SEQ ID NO: 6993 - protein, 537 aa, Mesocricetus auratus
MDSSLLWASGEMDAGRSGLLLLLCVLAWAEGAKVLVFPMEGSHWLSMRDFSRELHARGHQIVVLGPDVTLHIKGEDFFTLKTYPFPYTEEEYQQKILGNAKKSFEIQGSVEVFFENIAALRNFSELYASSCVDLLHNKTLIQQLNSSFFDVILTDPIFPCGAVLAKYLQIPAVFFLRSIPCDIDSEATQCPNPSSYVPKLLTTHSDHMSFLQRVKNMLYPLTLKYICHISFTPYERLASELLQREVSLVEILSHASVWLFRGDFVFDYPRPIMPNMVFIGGINCANRKPLHQEFEAYVNASGEHGIVIFSLGSMVSEIPEKKAMEIAEALGRIPQTVLWRYTGPKPSNLAKNTILVKWLPQNDLLGHPKTRAFITHSGSHGIYEGICNGVPMVMMPLFGDQMDNAKRMETRGAGVSLNVLEMTVDDLENALKKVINDKSYKENIMRLSRLHKDRPIEPLDLAVFWVEYVMRHKGAPHLRPAAHDLTWYQYHSLDVIGFLLAIVLTVVFIVFKCCAYGFRKCFGKKGRVKKSHKSKTH

SEQ ID NO: 6994 - protein, 519 aa, Vanessa tameamea
MSWVWGTVIALSVFATTEIEGARILAYFPTPSISHQVVFRHITKELARRGHEVTVVTTDPIPKEQEPENMTQLDVHDVSYKHWEELFLMHKGKKQDILHQVNVLFEKLATVVKIQMETPNVRNFLKNKDSKYFDLLLLEAMNRPLIGIAHLFDAPIIHISSLGAVPHQYKNFGAPMHPLIYPTPGSFRSYNLTLWEKGFELIKYLILESTISNALDFDIMIMKKTFGDDVPTIEELAKRIQMLFLNEHPIWAENHPVPPSMVFIGGIHQSEVKELPKDLKNQLDHSEHGVIYVSFGTNVKPSLLPPEKIQIMTKVFSQLKYDVLWKWNNDELPPLSNNTKISKWFPQSDLLKHPNVKLFITQGGLQSTDETINAAVPVIGIPMLGDQWYNVEKFVHHKIGLQLDITTLTEKEFKDAITTVIEDKSYKNNIIRLRTLMREFPVKPLDNAIWWIEHVLKYGGEHLQSPAVRMSWTEYYEINLVLIVLAILVVILVLLSYVLRFVLSIAYNIYITDKKLKSF

SEQ ID NO: 6995 - protein, 208 aa, Operophtera brumata
DLEKLFNESKNGVIYFSMGSNLQSNDMTTEMKQSLLKMFGKLKETVIWKFEGELENVPNNVHLLKWAPQQSILAHSNLKFFITHGGQLSTTEAIHFGVPVIGLPMLGDQYVNMRAVQNKGFGIMVQLREELADDLNMAIDKMLKDPTYTTTAKHLSSIYHDRPVSPGTEIVHWTEHVVKTGGAPHLRSSALLVPLYQKLYLDYFALII

SEQ ID NO: 6996 - protein, 500 aa, Danio rerio
MRLVVCFLSLLTVFSAGQCGNILVWYTEGSHWINLKIVLDTLLDRGHNVTVLMPDGALFMKAKESDRFSYQHFSVSTSAQDMQDFLDEFLHFSVFELENSNLLQIQMKFFDLLSKHQDMSLSYCDGILKSPELMDKLKKGKFDVLLSDPMYPCSDIVAEELNVPLVYTFRFSLAHTMERMCGQIPAPPSHVPGATSKLTGKMSFTERIYRRPTSYCEMMGRADIWLIRTYWDFEFPRPFVPNFKYIGGLHCTPAKPLPKDMEEFVQSSGDDGIVVFTLGSMIDKVPKEMSNRIASALAQIPQKVLWRYGGEKPDTLGENTRIYKWMPQNDLLGHPKTRAFITHGGTNGIYEAIYHGVPMVGIPLFGDQPDNMVHMTTRGAAVVVDSIKSMQPQELVDKLNTVINDPSYKENAMRLSRIHHDRPMKPLDESVFWIEFVMRNKGAKHLRVEAHNLTWYQYHCLDVFAFLTTVLTLVLYICFKMAKFFIMRCCFRSKRKSKKE

SEQ ID NO: 6997 - protein, 525 aa, Haemonchus contortus
  MOD_RES (41)..(45): Any amino acid
MEYCLQNGSFCPGHCKQSGNFQYSSSRDVGKGGSRCHDGDXXXXXRMSYIGLLLLIFLVPPWSTAFKMVLFVPDIANSQVIFNTRVAETLAKAGHDVTMVMISGYDDRDSSDVKIMKDIHIHRVNASFGMKRKELEEQQQKVIFKDLPMWDSRLRNQISRMTILLTKMCRKVVENKEFLNWLVAQKFDLAFSHIYDVCHIGLIHYAKIPSWIWLNSGGLMDFVAYHLGVPTVPSYVPPIIMESTDEMDFVQRMKSFIGHTIMPGMWKKMISDPETEIFRELVDPNFPDIVDIAKTCPLVMVNSNELYELTRPSLAKVINIGGVGIQMKDAKPLSKEFQKIVDNCEGLVVFSFGSVTPSHRMPDEWKKAFLEAFSRFPKLNFVLRYEGTDLNDQLPKNVFLFKWLPQADLLRHPKTVAFISHGGYNSLQEVITAGVPLITVALFGDQPRNAKLAERHRFAINIRKGDLSADTVAEALQRLLTDKSYSQNVKRLSEMVKKKPVSPDHLLVAWAEFVAEFKTLENLVP

SEQ ID NO: 6998 - protein, 515 aa, Acyrthosiphon pisum
MSTLFRTIILPVFCILTVSMTCYVSIDALQILAIESVAGKSHWNFMSAVLRSLTDAGHNVTVFTPFLDGNRENYTEVYLNVPSVVEINIEETLNTFGKPTTMIPTLMNMSRYFCNIAYEQRDMREILYGGKSNYDIIFTEVVSSECVSYIASKLELPLIYLIPSPMITHIEHTILGDVSNPATVSHLMAHNAVPRTFAQRFLNVVFLGYSLFALKYKEMEMKKIDSQPYDLVEPLKPTLVFMNTHYITYAPSSMPASLIQVGGIHLKKPKSIRNDVLEFIENSPHGVIYFTFGSVVSMSTLPDHIQNAFKEALAQVPQRVLWKYEGEMKDKPINVMTSKWFPQRDILMHPNVKLFISHGGIFGVYEAVDAGVPVLGFPLFYDQPKNIDNLVEAGMGISMDLLTLQKDELIKNILELINNEKYMQNAKIVSDRFKDRPMSPAESVVYWTEYVIRHKGAPHLKSHAFNLTWYQYFLLDVIFVILFFISFTIFINYKLFKLIYYCFLKYSQPMKPKLE

SEQ ID NO: 6999 - protein, 313 aa, Caenorhabditis briggsae
MTDFKSASPCLLYSDVSLYDTSFQIYSGPVASSYSEASGKLLGVDGATKSRIFEESILTVNDFPDTFSFIQPRGSDLIRVGEHCASSRNLPSEFRNFAEDPISKGTIYVAFGSYVNLEDGPEGTVEAFIEALNFFEDYRVIWSHKGNVTGVKCHVKLVNWAPQKEILAHENTVAFITHGGLKSAKEGVCSSVPMLFLPFYGDQPRNAHRFVTNGIAEALYKKSITAIDIKQKLEKLLEDESYRANVAKVRSYYLDAPMSSLDLGAFHISRVLRHPESHFVRFKRRSISMNHLQYLNIDIFLIILIVSFLIFKA

SEQ ID NO: 7000 - protein, 533 aa, Pelodiscus sinensis
MVSLFQGVHHLPIWLLLFMSFWSLSEEGKLLVIPVDGSHWLSMHSLVLQLQQRGHHIVVAAPEVSALIEPSEHYTLKTYFVPYTKEYLEAEFRRLGHQVFTPRPFLERVTQTFARIGNITTFLLNSCKQLLSNKELIISLKESAFDAVLMDPIFLCGQAVAEYLSLPSIYFSRGIPCGLEFQAARCPNPPSYIPRFFTHYTDHMTFPQRMWNIIVSSALSWSCSLLYSSHEDLIRDFLQQDVTMTELLSHASIWLLKYDFAFEYPRPVMPNIVLIGGVTCGQQKPLSQEFESIVNASGEHGFVVFSLGSMVSEIPMKKAQQFAEAFGTIPQTILWRYTGQPPPNLANNTKLIKWLPQNDLLAHPKARAFITHGGSHGIYEGICNGVPMVLMPLFGDQMDNAKRIESRGAGVTLNVLDMTSKDLSAALNTVIYDKSYKENIMRLSALHLDRPIHPLDLAVHWIEFVMRHKGAPHLRPAAHDLNWIQYHSLDVIAFLLAVVLVAMFISWKCCLFCCRKCFCKKGRVSKSSKTKAQ

SEQ ID NO: 7001 - protein, 434 aa, Toxocara canis
MSTATPFRFLLIFVISIIIQLTYAANILFINMYNSKSHALSMMPLAKSLANRGNRVAMFSIMVNSMNELDGGVENIEARMPIEKVQQSLTILGSVVWEWDFQPYRLSRAYTQAEFYYISLDDLDEDWQSFMSRLKTVRDLIIEWFSMGVLGAKTLQNGIRMIGVDEQLSDLVAPVQHFNYKCVAILPADLRRKKPVRSEGAEDFPIVDAKPLPEDVEKFVSSPNSRGTIYVAFGSMADWSNAPSHVIKSFVEAFNALDAYRIIWSSKAKPPEGLKDHIKILSWAPQSSILLHKRTKLFFTHAGLKSIRESICAKVPMLAIPFFADQAKNAYLCRAAGFARIIHKRKVNASVLLESIEDMLNNGSYQRRISKVNKLCMESILAPLRKETFWVERILRSKAPYVTYPIKGAQMPLMQYFGLDIASFLVVIIIVLLK

SEQ ID NO: 7002 - protein, 514 aa, Pieris rapae
MYTLTFFVLSYVLTVANTAKILAVFPTPSVSHQVVFRPLMQELSKRGHDLTIITTDPIYSAANSPKNFKEIDIRDISYKVMRENFTFNVKLGKKSDSFAQIESFVLMNTMLASVQLRHPRIQDLINGQEKFDLIFVEAWQTHAYYYSYVFKAPVILISSYGMFGNEDTAIGALTHPFLFPTLVQQRTFNLTFWEKAEEIYKNLFFRRQWSLMEIEDRNLWRQILGKNVPDFKEIYNNIDMMFMNIHPMWISNQPLPPNVISIWGIYKNQRKALPTDLQNYLDSSKNGVIYLSFGSNVLSSVLPADRIEIFMRVFARLNYDILWKWEKPELPGKSENIKISKWLPQTDLLRHPNVKLFITQGGLQSTDEAINAGVPTIGVPMLGDQWFNTDKYVYYKIGMKLDMETLTEEVLETAIHTVINDTSYRENTVKLRTLLEDQPQSALDRAVWWTEYVLRHGGAKHLRAANANMSWVEFYEVEFVLKFASLLLLPLVLVVAVLYFTYITLMPKQKLKTN

SEQ ID NO: 7003 - protein, 554 aa, Marmota marmota
MAGSPGGQGSQRLHCCPFASPGRSVLLPTVQRVSAGLFFIALWGTVVGDRLLVVPQDGSHWLSMKDIVERLSDRGHDIVVVVPEINLLLKESTHYRRRVYPVPYGQQEMEGRYRSFGNQHFAERSFLTAAQTEYRNNMVVIDMYFLNCQSLLQDSGTLSFLKGSKFDALFTDPALPCGVILAEYLGLPSVYLFRGFPCSLEHALGGSPNPVSYIPRCYTQFSAHMTFPQRVANFLVNFLESYLFHCLYSKYEELASGLLGREMRLSALYQKDPVWLLRYDFVLEFPRPAMPNMVFIGGTNCKKHGVLSQEFEAYVNASGEHGIVVFSLGSMVSEIPEKKAMEIADALGRIPQTVLWRYTGTPPSNLAKNTKLVKWLPQNDLLGHPKTRAFITHAGSHGVYEGICNGVPMVMMPLFGDQMDNAKRMETRGAGVTLNVLEMTSDDLANALKAVINDKSYKENIMRLSRLHKDRPIEPLDLAVFWVEFVMRHKGAPHLRPAAHDLTWYQYHSLDVIGFLLAIVLGVAFIAFKCCAYGCRKCFGKKGSVKKGHKSKAH

SEQ ID NO: 7004 - protein, 400 aa, Vigna angularis
MACSPSLHITMLPWFAQEHITPFLQLSNSLAERGHKISFFIPKHTHASFQHFNHHPNLISLIPICVPQNHHHGLPHVAEEIASKVHSSTVSLSMTPMLLCEKDIEVHLLELKPNIVFFDHAYWVPKPRLTQCLKIKSLVYHVISFSSLTCESSYSYPLGISKGYCCNIAEHHNPLHEPKLLAGSGKVDHGKCIVHTEPCTNSILAQSYATGLKGCTVIEGAYADCHRRHVTVPKEATCLIDENWAKWLGNYEAGSVVYCSFGSECTLEPCQFQEVVLGLELSGMPFVAALRPPKGFECVESALPKGFKERLQGRGVVSSAYFPHRFILEHPSVGCFVTLSGHSGSLSGALVNKCQLFLLPNHGEMVFSAGVIGTTLKVGVEVEKLTTKRVSLLKRVFAKL

SEQ ID NO: 7005 - protein, 529 aa, Cyprinodon variegatus
MELRLSVCVLLLLCASRCSNGGKILVWYTEASHWINMKPILETLVDRGHQVTVLVPSASMFMNSSEPSRFQYEPFDVSISLEAMEESLEEFIHFAMYEADYMSYFQVYVRYMELMRIELQNNLDILSGVVKSEMLLKKLKRENFDLLFADPIYPGSELTADMLGIPLVYSLRFSLAHNWERMCGQLPSPPSFVPGAMSKLTDKMDFSERLWNVLFYALNDIVIDNVMWNMLDKYYSDVKGSPTSACELMGKADIWLMRTYWDFDFPRPILPNFKFVGGIHCRPAKPLPTDMEKFVQSSGDDGIVVFTLGSMITNVTMEKANLIASALAQIPQKVLWRYNGDKPKTLGSNTRIFSWIPQNDLLGHPKTKAFITHGGTNGIYEAIYHGVPMVGIPIFGDQPDNMVHMEAKGAAVIQNMNFMTTESLRDAILTVINDKSYKENMMRLSRIHHDRPMSPLDEAVFWIEFTMRNKGAKHLRVQAHELTWYQYHSLDVLTFFLILDILFIFILLKTCSFCWHRCCKSKKVKRKAE

SEQ ID NO: 7006 - protein, 511 aa, Amyelois transitella
MMRAILLLLSTLSVVYGYKILCVFPVPSPSHNTLGKGIVTALLKGGHQVTWVTPYPFKNENKNLTIIPSRTEMLGKDHNMADPKYAKSGISFVKQFGRNISHATIENELFRKVLINEQFDAVCTEWFFNKLFAGFAAIQQVPWILLNSVTYNAFMEEIVDEVRSLSTIPLLINDAPVPMNLLQRLKNTWIYTMVAVSEWLDSFSAQEEFETYFAPLAAARGVPLPLFSEIEKNVSVLFVNSHPSFDVPFPMPPNVVPIAGYHIPEYVPPLPNDLQSILDNSPNGVVYFSLGSVIQTSNLPEHTLKDLIRILGELPYTVLWKFEKEFTGLPKNVHIRPWMPQPSILAHPNVKLFITHGGMLSSLESLQFGVPLLAVPVFGDQPSNAARATNAGYAKTVPFSHDMGPKLQAVLNEMLSDDKYYKRAKYLSALFHNRDVAPSKLISHYVEVAIESKGAYHLRSPTRLYAWYKRWMLDQLAILLAVVYLLVVIVKKLFSLGSSSKEKSHIKKKRN

SEQ ID NO: 7007 - protein, 520 aa, Myzus persicae
MTAVVVEPTGRLAVGLQAAMVVVMVLLLEWPSAASGARILAVFPYNGHSHFAMVEPLMVALSERGHHITVISPFPRRKGSGGGRRYVDVDVSDTLPPVISQLNVTKEFGHLVDPVTGFRHLCQMNHRVCEATFEHPLVRALIHEPLRFDVVFAEAFATDCFAAFAHAYDAPLISIRTSDYSPQLNRRVANPQNPAYLVNHLLTYTSRGMSFAQRLVNALATHFGVVGYHAFSDGPSTELVRRHFGPGTPPVPEIARRRTALVLVNAHHSLTQPRPTVPNAVEVGGLHIAQPAEIENEWSDYCDLCDQGVIYVSFGSLLKGSSFPLQFTMAFVRAFEALPYCVLWKYEGEMISKRIKVSKWMPQQQILGHKNVKVFITHGGLMGVMEAVYFAVPMIGIPVFGDQQSNVANCVAKGIAIGLNHRQITVEKLIKSIQAVVMDSKYKSKAFELSARFRDRPSSALETAVFWTEYVIRHGNETNTASLAIDFDFYQYFLLDVVLVGLSILLFLFYTAFRIKKCIR

SEQ ID NO: 7008 - protein, 528 aa, Drosophila ananassae
MKRKNLNIGFISLFCFYFVATVSAYNYLVVSPSAASSHYHVGFSLVKGLANSGHNVTLISAFKQKKPVDNIKDVTALGIHKTMEEHISSIVKNMKKPMWLQSFDIYSMGLKMTEALLNDTSVLELMKSNKTFDAVISEVFLNEAQLGLAEHFKAPLIVLSAVGAMPAHADLVGTSFTPSYIPHALLHFTDHMDLWERLVNFLFVTFTYSIHKFFALPQHEALYQKYFPDNKMDFYEMRRNTALVLVNEHASLNHPRPFSPNMIPVGGMHINRQPPQPLPENIRLFIEGAEHGVIYCSLGSNVKSKTLPLEKRRAFLETFGKLKQRVLWKFEESDLPGRPDNVLISDWFPQNDILAHDKVIAFISHGGRLSILESIYHGKPFVGIPFFGDQFMIMAQAEQNGIGIALNYGDLTADILLAATKKILQDPKFTRNVRDMSDRFRDQPQTPLERAVWWVEHVTRHKGAKYLKSAGQELNFFQYHSLDVLLILFIGLFFIIYLPIKTFVWILNRLNQFFFKTKVQHGKKIKQN

SEQ ID NO: 7009 - protein, 657 aa, Papilio xuthus
MEPGLPSGLPCVTYRPFLGVKMKTTVLLWMFLTISSISAYKILCILPAPSRSHATLGRGIVNTLLEAGHQVTWATAYLDKSNNKNLRQIEISKSRDVVEGMDVTNQGRMSVSLVREFARNISIAALETSELRDVLINEKFDAVVTEWFFSDVEAGYAAVQQVPWILLSGVVMHPYLEYLVDSVRSLPVTPFMMNDFPVPMDLWDRLANTYSFGMFMFGNWLESTTSEGDYDKHFSSIAKARGVSLPPLSLARHNISILLVNSHSSFAPAQPLPPNVIEIAGYHIEETTPTLPKENIMMLHISVKICVKSNRTWPVVDYGLVILNLGKATSHSVETYPERLHESRLESTTSEGDYEKHFSSIAKARGVSLPPLSLARHNISILLVNSHSSFAPAQPLPPNVIEIAGYHIEETTPTLPKDLQDLLDSSRNGVVYFSMGSVIKSAALPDSTKRELLRVLGSIPYTVLWKFEEQLEGLPKNVHIRSWMPQASILAHPNVKLFITHGGLLSTLESLRYGVPLLAIPVFGDQPGNAIRAMRSGYARKVNFSPDMAPELEKELKHMLSDDTYYNKAKELSMLFNSRPVTQRKLILHYVELAIESKGAYHLRSKSQLYKWYELWMLDQLAVVFAALFLLYLLLKKIVSVLTKKNVKEVKKSKKNK

SEQ ID NO: 7010 - protein, 305 aa, Ancylostoma duodenale
MRPGFLPKLFMGHEYAICRKYPYVKVMANTNDLYDMTRPLLAKVVNIGGVGMELADAKPLPKNFDAIMSKADGAVLFSFGSVTAAHKMPIEWKKAFLESFRNLPKYQFLMRYEKDDLNDKLPPNVHLFKWLPQSDILRHPKTKAFITHGGYNSVQEAILTGTPLIAIPLFGDQPKNARLIERHGIGMILQKGEISVHTITKALAKVTGNSRYSANAKRLSRMVDRKPVSPSHLLVKWSEFVAEFQTLENLEPAGNKLNFFQYHSLDVIALLISITAIVLFILFQVVKFACLRIFSYCKQKKQKAE

SEQ ID NO: 7011 - protein, 525 aa, Drosophila ananassae
MIFLHLKIDFQLDVAEAADILGIFPYLHTAGPLFVRPLVRVLVERGHKVTVISPEHTPTDIEGVRHIRVPELNRQIRKIMDPDHYFHFFSTKWKKSILAATMLANVSTALLADEGVRKMMKDRSERFDMVMIEASHLEAMYGLAEYYNATLMGIASMRLNWHVDELAGNPSPSIHESISLEGPPLKYSLLGRFYNWLDITEEYLLERLVIRPSQLKIFKWFFGYSAEKLEELRSRFNLILINTHFSMGRVRANVPNIIEVGGMHLSDPPEPCDEELQRFLDEAEHGVIYFSMGLEIRFKYLPDYMQQPLLQSFAELKQRVVWKNELFTSPNKTDNVFRIGKAPQRIILSHPNTRLFITHGGLLSVIEAIDSGVPMLGLPLFFDQFNNMQRVESAGVAKVLDWNSLSVDNLISTVHEIIEDPKYAQKARETAQNFRDRPMNPLDTAVWWTEYALRHRNATHIRLNKGELPFMVYYQLDNLLPLILRIGVILVSIIFFSYKLFEKLQIRQRRLQERNLFLRQQIMLR

SEQ ID NO: 7012 - protein, 513 aa, Bicyclus anynana
MNNLLKILCIVSLIGSMESARILAVYPVPSISHQVVFRPLMHELAKRGHEVVVITTDPAYPKSSPQNLTEIDVHDLSYKMWNDFLASGKAQSHMTAEQLKIFMDVILDVFEAQTKSEEVQKLINDKEKRFDLLFVEACVRPALAYGYRYKVPMIEFSSFGGIVGTYDETGASTNYLLYPTPLREKVYNLTFWEKLHDGYQEHTNNKIAIEHEAIENEVVRSIFGPNTPSLSELKKNVHLIFLNVNPIWDFNRPVPPNIIYLGGIHQKPDKELPKDIKTYLDSSKNGVIYMSFGTNARPSLLPVETLNIFTKVFSQLPYDILWKWDTEELPNRSKNVKISKWLPQSDLLKHPKVKLFITQGGLQSTDEALTAGVPLIVIPILGDQWFNAEQYVKFNIGIRLSLETINEADFKNAIETIIQDKTYRENVVKLRNIMRDQPQTPLERAVWWTEYVLRHGGATHLRAAGAHMHWTEYYAMDVVVFIFTVALVIVGSAIFAIRYAMSLKGLKIKIKKS

SEQ ID NO: 7013 - protein, 517 aa, Neodiprion lecontei
METRAILVFLAACYVTNGARIIGVFPYQGRSHNIMFEPLMIGLARAGHTIDMISHFPPAKPVPGYNHINLKGSLPTYVNNVTASHARKATTVGYGISRLCGLLSKQLCSLFETPQVQNILNTDVKYDLMVTEVFTTNCFLAVAYKLKIPVVGVGSSVMYSWGYDPFYGEANPSFIPSQFGAFTNEMSFIQRVENTIVHFYSKYLFYSYEKTVSEPVAKKHVPDLPSLNEIYNNMSLLLVNSHYSVHGARPGNPAIVEVAGLHIDETQALSKELDVFLNSSKDGVIYFSMGTMVRSDTFDPEKISAIYESFSELSNYKVLWKGNVEDLPKPLPSNVKVVAWAPQYAVLRHPKVKAFVTHGGLMGTIEAIQAGVPMVGMPFMVDQTFNIMGYVQKGIAVHVNYEDLTKASFSNALREVLLNPKYQSNSERIARLFKDRSLSPLDEAIFWIEYVIRNGGEPLKSSGRHLNWFQYYLLDVFLFLINIAAIVLAIVYVIVKKTLSAIVGTKSHATSSKKKIS

SEQ ID NO: 7014 - protein, 1042 aa, Caenorhabditis brenneri
MHRLQKDNHTTALEFAMFHPDIDFGMEEQFIEMGGFQNPFASPDFDKIAFDEEYSFIHQAVAYGFGSETCNNILSHRRDRFFEILNEGWDLYMSDSLFAVCGYGMAEISGKPHVMMHSTDLEAAQGSFKAFSRNYATFVPSNLPFTMLDFTVSKFQHRVWATYDWFGSFIFTAFVGNFAQKWALRSIIPSPYFSFSEYNRRSSFSFTDMPDSLFPPASRTNDFFSFGAYCKSSHKPLDAEFKTFIEDPKSKGTILIAFGTFIDWRKAPDHYYEAFSTVVNQLTDYRVIWSMKGDRPSGLGKHVKTAAWVPQNQILHHNKTVLFLSHGGLKSTKEAICSATPTIFVPMFGEQTRNAWLIQEKGFGRIMNKFKIDEDVLGTHVNEVLLHPDYQNNANKFLTHYMDQPIPTLDEGAFKFNRLIKYGGKMPSPVTSLFLNPERRHIRINEFKDEFMESFRVFSPAVFETVDLLAEGQMINEVNELLGDYFRFYSQGNRRASFVEISPNLLELGRRNLEVDARNMEALADHQLQQLREIYHNKNVLPSPPPPEPDFLDYASEFRLNQTAVNTGPEKRTGGVPKSRVKRSPPRQYREPYSGGPSRHQNQPSYPRSPGRSPSTSNRRYQTSQQEGSSQFSSSVSSRGGYSGGFSNMRYSKDPRSMGNAGQMHPREAAPRFSSFRYDEPGTSYSSSDPQDDSGPLFQPGRQHRPHESSSEYGRHRSTSIHRHRFNEPHASREAQFRFPHQVSSDNRYRETDRRESWSESAGRSRLESREESSFSRTPASSRRPSSDEQSSVYFSAPSEFESSEDRVKSSAYKSDFNRKDETSQRRLKTGSSHISANSRDSDEFSSMDEAFAQEKDSDRRSDYKNSSSRRFQDTPVWIKESKNRISTSSEFDVDEERSFRHARKTRDFSTSSSGASQASMLSFNPNASPFIPHTAPPSQSTTSSLFSERSYSNNVAASRHDRPNRNSAESTAVSNRPEERKIVECVRCEPMMCNSNFLIRCWNCKRVQCPPNHYIPPEFQERAKLTCFHCHAPLDKSNYPL

SEQ ID NO: 7015 - protein, 513 aa, Acyrthosiphon pisum
MYLKLFSILFYTFAGSWIPAPVESANILAVETVGCKSHWNFMSSILRALVDNGHNVTVFTPFADGNRENYTEVSTGATTFLEMNIEDLMDKSNGPIKFTSHMLQMSRTMCNVIYENSKMKEVLSNTRSDFDIVITEPSRSECVSYLAIKLNLPLIYLQPVPTMGIMERMYTGHMSNPAVVANKLASFGVPKTFVQRTSNLAILISCTIIREFNELIMKFTEPKEYDLHAPIPPSLVFINSHFTIEPASPIPSNVVAIGGIHLNLKATKKLPKDILDFIEQSPHGVVYFTFGSIVKMTSLPEHIKKALIDGLAQIPQRVLWKYEDEIENLPKNVMVRKWLPQREILLHPNVKLFISHGGISGLYEAIDGSVPILGFPLFADQPKNIDNLVNAGIAISMDILSITKDAFLKNVLELLNNEKYMENVKTASKIFKDRPMSPASLVVYWTEYVLRHKGAPHLTSHAMNLLWYQYYLLDVIALILVFIIVVIIVSYRIFKSISKYFSKYSRNTKSKSE

SEQ ID NO: 7016 - protein, 265 aa, Mustela putorius
MPNMVFVGGINCAGKNPLSEEFEAYVNASGEHGIVVFSLGSMVSEIPEKKAMEIADALGKIPQTVLWRYTGTPPPNLAKNTILVKWLPQNDLLGHPKTRAFITHSGSHGIYEGICNGVPMVMLPLFGDQMDNAKRMETRGAGVTLNVLEMTSEDLANALKTVISDKSYKENIMRLSRLHKDRPIEPLDLAVFWVEFVMRHKGAPHLRPAAHDLTWYQYHSLDVIGFLLAIVLGVVFIAYKCCAWGCRKCFGKKGRVKKSHKSKAH

SEQ ID NO: 7017 - protein, 520 aa, Lissorhoptrus oryzophilus
MFSICLYMREIHFLILCTLFFTTQSAKILSIFMTPTYSHQIFYQPIWRELSLRGHKVTVYTPNPINDNSLTNLTEYDLGFSYDIVKNIHFQDTNSPSDNLKLISKIYESVFEGQMNHKYLQDLIRNANNETYDLFLVEYMWQSYYAFKELYNVPMVGISSLPLTLLASESLGMEKHPVLDPEIFLQFSNANTLGRKILSWAYNWFYKILVKPQLQNKFNQEIRKYFGEGIKDVRDLAKEVSLIIGNYNFVLQNIKPLLPNYIPISSVHIKSRKPLPKDLAQHMDNLKTDAIYFSLGSNIKSSKVFMPKLEELLKILGSLPYTILWKYETDKLPKNLPKNFLVRKWFPQQDILGHPKVKLFITQGGIQSIEEAIVREVPMLIMPFLFDQKVNADRCVELGIAETVNFYEFTEEEMDNKIKKLLNNQMYHKNIKEKAQIIRDQPLNPVDTAVFWIEYVLRHNGAPHLHYKGADLPFYEYYMLDVYAVIGIASYIMLRIFKIVLKVIFLFYYRAKKRILCKII

SEQ ID NO: 7018 - protein, 529 aa, Drosophila grimshawi
MELFRSVLFITLLYQLLAALGVGVQAAQILAVFPFPGKSQYIFAEQYLKELARRGHNVTVINTFGSSQIDPNFKVIGATKIHELMAAFGSADYDQQASQWTILTMTTQFLNMLTTSVLDDAAVQQLLQSEQAFDLVLLETVQTEALFGLAQHFRALTMGISSYGTDRHIDDLMGNISPLSYNPMLLSSRTDHMSYEQRLWNLWDACLSWLHKHWVHLPSQEKLYEQYFPQASKTLEQVLDSFSLMLLGQHFTLSYPRPYLPSMIEVGGLHLQQERDPQPLPDDLATFVTGASHGVIYFSMGSNIKSSDFPAPTRQVLLQVFGSLKQRILWKFELEQLDDLPENVLISKWFPQPDILAHPNVKLFITHGGLLSTIESIYFGKPVLGLPVFYDQHLNVERAKQAGYGLVLNLWSMNATQLHDHIMELLSNISYTQAAKIKSKLYRDQKDTPLERAIWWTEYVLRHKGAPHLRSASRDLNLLQLHSLDTWGLLGGIVSLLVLVILFVLLRVLRILRYILCRRWKTNNKLKTQ

SEQ ID NO: 7019 - protein, 514 aa, Drosophila busckii
MNLRWFILLWAWQSVQAANILAVFPFPGRSQYIFAEQYLKTLASSGHQVTVINTFGSNETLSNFKVIGATKIHEILAAYGNADYSQTASQWTVASLTTDFINLLTSCILEDAAVAQLLRSQQTYDLVILETVQCEALFGLAQHFNALTIGISSYGTDRHIDELMGNISPLSCNPLLLSARSARMNFAQRVANVWEAAVGWLHRQWVHLPSQRRLYSQYFPAARRSFEQQLGSFSLMLLGQHHTLSYARAYLPNMIEVGGMHLRQSKPLPAQLAEFIAQADAGVIYFSMGSNIKSADLPPATLQLLLQTFGQLQQRVLWKFEAEHLSNKPDNVLIDKWFPQTDILAHANVKLFITHGGLLSCIESIYYGKPLLGLPVFYDQHANVQRAQDAGYGLGLELWTLNGTQLQQTINELITNSSYRRAAELRSQLYRDQLETPLQRAIWWTEYVLRHKGAAHLAAPARDLNLVQLHSLDSWGLICGAASLIALIILISLIALLKCLSYLRTKTAAKAKTQ

SEQ ID NO: 7020 - protein, 1037 aa, Diachasma alloeum
MSFIRLLSLIASILIIHNETVSALRVLAIYPFAGKSHSIGAEHLLKEMTRRGHSVDVVSHFPQKEPIPNYRDISLRGSLPIFANNVTYDMITEYSIMQPREFVELAGISVCELLGLPVLQELMEKPKGTYDVIIVHLFAAHCYIGFGQKLNAPVVGVVTSRLQDWLFDPFANPLNPSYIPSFFSTFTQHMTFWERLQNTLITDSTRHQFRYWLEAESLQVEKYFGRRISSLYELYKDVSLVLVNEHFSSNDIKPATPDIIDVGGLHIYDNTQQLTPELQDWLDGSTEGCVSFTFGSNVIIESFPKELLKAFYQSFKRIAPVRVLMKGDPKALVKDLPKNVKILPWIPQIAVLKHKNVKAFITHGGLLGTQEAIAHKVPMIGIPLFGDQYTNMQNYANRGIAVVLDVKTLNENSLTNAINTVLKDPTYRKNIAKMSALFWDRPMSPVDTAIYWIEYAATHGPVLKSPATELSWWKFYSLDVYGFMLMCILTIIYTIIKLITLLCRCSRTQRKKHRDKMSLIKLLPLFASLLIIQNENASALRVLGIFPFPGRSHTIDVEHLLKEMSRRGHTVDLISHFPQKKALPNYRDISLRGSLPMIANNVTFGKFKTFNSIGLERFIKVTGTDVCDLLDLPVLQKLMETPKGTYDVIIVELFVSHCYIGFGQKLKAPVVGFVTTKLADWLFAPFAIPLNPSYMPSMHSGLNQRMTFWERLQNTLLIDSICIQFDHYLKAQVPQVEKYFGRRISSIDELYNDVSLVLVNEYFSTNDIKPATPDIIDVGGLHIYDDPQQLTPEVQDWLDESTEGCVYFTFGSTVNLESFPKELLNPFYQSFERIAPVRVLMRGDPKFHLKDLPKNVKILPWIPQIAVLKHKKVKAFITHGGLLGTQEAIAHKVPMIGIPLFADQHNNMRNYENRGIAVVLDLKTLNENSLTNAINTVLKDPTYRKNIAKISALFWDRPMSPVDTAIYWIEYAARHGPVLKSPATELSWWKLNLLDVYGFMLMCVLAIIYTIIKLITLLCRCASGTHSKNVSKAKKHR

SEQ ID NO: 7021 - protein, 519 aa, Heliothis virescens
MKILVLFSLFFGLCSVESLKVLVCFHMPVKSLSILGTGVVRHLLNAGHEVTYITVYPLKNPPTKNFRQIDISKNIELVAHDETLTMGYVLEHQIEKNGAYQIQVFAEENARLTFNNENMKKLIQDPNEKFDVVVCDLLESEVYAGLAVLYECPMVWLYSMGAHWQVLRLIDHGTNPAFTPDYLSPNNLPLSFSERVEELWARVRWQFLKTFITQPRERKMYEEIFGPLVARRGRTLPDYEDVIYNASLIFGNEHNAIRDRPATPQNFKYIGGFHIEDPVKPLPKHLQELMDNSKHSVIYFSMGSFLQSTSLPRKLVVELLNMFGELKQTVIWKYETNLTDIPKNVHIVNWAPQPSILAHPNLKMFITHGGLLSSLEAVHFGVPIIGVPVFFDQFTNINKAVVNGFALRVNLDYDLPNGLRSAIKVMLNDNRYSQKVKEMSSIYHDRLAKPGDEIVHWVEHVVRTRGSHHLRSPAFYVPLYQRLYLDLLALILAAIYVIKQLLASFYETKSKKNSKKKRN

SEQ ID NO: 7022 - protein, 514 aa, Amyelois transitella
MLKLFLLIFSYCILQNESARILAVFPTPSISHQVTFRPLTQELVRRGHDVVVITPDPAFLNSDKPDNLTEIDVHDVSYKLWTEKVTNEAVAFGDKGGLVKQLDVIFDTIVQVFETQMASDEVQKIIKNETGRFDLLLVEAFVLPTLGFSHIFKVPVIQISSFLPLYFDLHNVGAPDHPILYPTFGSQKLDNLSIVERIEALLGYLYLDMDKYETVLDDVNKRVFGPNVPRLKELYNNIDMLFLNTFPMWDSNRPVPPNVKYVGGIHINTLKELPQDFKAYLDSSTHGVIYISFGTNVSPSSLPPEKIQVITNVLSRLPYDVIWKWDKEELPGRPKNVKIMKWVPQSDLLRHPKIKLFVTQGGLQSTDEAISAGVPLLGIPMLADQWYNVAMYERHRIGIKVDLDEVSEEKFKDAIDSLTKDDTYKQNIMRFRSILSDQPQTPLQRAVWWTEYTLRHGGAKHLRAPAANMPWTTYYQLDVLVVVMLAAMPVIYLMVMMISAVKMLYNAMMELANK

SEQ ID NO: 7023 - protein, 245 aa, Diuraphis noxia
  MOD_RES (58)..(58): Any amino acid
MDKIDILDFIENSPHGVIYFTFGSVISMSTLPDHIQNAFKEVLAQVPQRVLWKYEGEXKDKPINVMTSKWFPQRDILMHPNVKLFISHGGISGVYEAVDASVPVLGFPLFYDQPRNVDNLVEAGMGISMDLLTLQKDELLKHILELINNEKYMKNAKIASDRFKDRPMSPAESVVYWTEYVIRHKGAPHLKSHSLNLTWYQYLLLDVIFVILIVITFVIFITYKLLKMIYYYFSKYPQITKPKLE

SEQ ID NO: 7024 - protein, 526 aa, Anopheles darlingi
MEKRFCQWLVVMAVLCIWAEYAVPGVKSAKILSIFPTTSKSHWILGSALMKELAHDGHEVTVISPFPLKNAPKTYRHVEITYNSSLFDDIMDEVFERVDDNFFQKMKEIVSFIEEIVNSTLTSPAVQTLLNSDETFDLLVMEVFLDDVFLGFADRFNCPVVGMSTFGASTWVNALTGSPQPLSYVPHPMTAFTDRMNFWERLGNVLFTAFDEVLMASAGIPVQQRYYDKFFPNANRSLSEMRRHGVSLILVNSHFSLSFPRPYLPNLIEVGGFHVNRKVNPLPEDIQTFIEQSKHGVIYFSLGSNLKPSKMDLQKRNDVIRVLSSLKQNIIWKWDDDTLVLDRTKFLLGKWFPQDDILAHPNVKLFITHGGLLSCTESIYHGVPIVGIPIFGDQLLNMARAEVSGWGVGVAYTKLNEATFAKAVTEVLNDENYAKRIAVISRRLRDQPVAPMDLAKFWVEYVLRHDGATHLISSAQDLSFIEYNNLDVYGFILTIAGLIVLLITLGCKKVTQRILPKKSNKSKKNN

SEQ ID NO: 7025 - protein, 531 aa, Cavia porcellus
MADPLPAFQRVSTGLFFLSLWGIVVGDKLLAVPLDGSHWLSMKDILEHLSGRGHEIVVLAPEINLLLKESKYYTRKLYPVSYSQEELEDRFRSFGNHHFAERTYVTAALTEYRNNMIVIDMWFFNCQSLLKDSNTLNFLRESKFDALFTDPGLPCGVILAEYLQLPTVYLFRGFPCSLEHAAQCPSPSSYIPHFFTTYSDHMSFPQRVKNMLHILGWKFICHFIFTPYASIASELFQRDLSVVDILSHASVWLFRADFVLEYPRPIMPNMVFIGGINCISRKPLSQEFEAYVNASGEHGVVVFSLGSMVSEIPEKKAMAIAEGLGKIPQTVLWRYTGTPPSNLAKNTILVKWLPQNDLLGHPKTRAFITHAGSHGVYEGICNGVPMVMMPLFGDQMDNAKRMETRGAGVTLNVLEMTSDDIADALKKVIYDKSYKDNIMRLSSLHKDRPIEPLDLAVFWVEFVMRHKGAPHLRPAAHDLTWYQYHSLDVIGFLLGIVLLVAFISFKCCAYGFRKCFGKKEQRKKTQKSKTH

SEQ ID NO: 7026 - protein, 545 aa, Diuraphis noxia
  MOD_RES (349)..(349): Any amino acid
MRTFALSTAFCNTMQLLVLLTLLLLFAEKSSSDEHKLQQVKPLNILAFLPTEGKSHFMGFKPLLETLVSRGHNVTLVAPFALDGAKRPYRHVKVEQTLGDFDMLKVAKYVNLVPTPLHLWWFGPHISETSLDKPSVANFIRTDRSSFDLVLFENFYHECFVTIGHKYNAPVVQLLPFSANSRISQWHSNPYNPAYIPDLTSAFGSNMTFAQRTTNAISAFFYTAVSRLVYLPRQRAVADKHFVYPGHERRPDLIDMLRNVSLTLVNSHPVIGSAVPMVPSFVYVAGMHCVPAGPLPEDLKQIMESAKEGIVYFSLGSVVKSSKMPKETVSLLLSEFSKIEQTVLWKWEXDDIPQLPKNVIVRKWFPQNDILGHKNCKLFITHGGIQSTTESIYHGVPMLAIPVFGDQQGNSLRAQYQGIAIQVPYFELTHEAFGSALHKLLIDPTYRENSKKSSAMFRDNPLPPLQKAVFWVEYVARHNGAKHLRTAANDLYWFQYMLLDVLLLVSFVVVLMAWTTKKMLCYVFSRCCRSRRNITSPTSTEKKTQ

SEQ ID NO: 7027 - protein, 527 aa, Linepithema humile
MKVLLSVLLAILACDQVVNGYRILGVFPLNGKSHWVMMEELMKGLARRGHQVDVVTHFPQKTPIPNMREISLKGSVDAVINNLTAVDIQRFGALSMESLAEIAGMRICKLLGHPKLQDLIENPPQDPPYDLVITELFAAPCYLAFGRHLNVPVIGMVSSVFHDWLNEMAGNPMSPTFVPSLFSTYDQNMNFKERLLNFLLTNYITWQMHYYTNSQLELVKKHFGIDVPHIMDLYSDVSLYLVNSHHSINGIRPMTTGVIEVGGLHLKDDDDPLSPEVQKWLDESKDGCIYFTFGSMVRIETFSKELLKTFYTSFEKIAPTRVLIKIAKKEELPPGLPKNVMTQSWFPQITVLKHKNVRGFLTHGGLMGTLESIYCGVPMVGIPLFGDQRVNIQNYVNKKVAISLESIDDVTEEKLTSALNNILKDPSYRKNIQKLSKMYLDRPSSAMNTSIFWVEYIAKYGNVLKSPVTRLHWWQRNLFDIYAFISLVIIVVLYLALFILRTLKKLVFGSRACAKKDNAAIKSKKNK

SEQ ID NO: 7028 - protein, 520 aa, Chilo suppressalis
MSASTGLILITTLFIYGDDAARILAYYPTPLISHQAVFRHLTLELHKRGHELVVITTDPMFSREEAPANLTEINLHDMSYNAWKTEASMPAAATQGSKESFQKQYAPIYKLLVKLVGMQLSTPEVQALIKDKTKTFDLILLEAYIDSALGLSHVFKAPVIQFSSVGAAVNNLEVIGAPMHPLLFPTLVHSRIYNLTLWEKLTQIKTFIDHVSVMKQTNIYAEEMLKNVIGPDVPPMDELWKNVDMLFLNVFPMWDFNRPLPPNVILLGGIHQKPEKDLPKDLNEFLDASKNGVIYVSFGTNADAALLPPHKLEVMVNVFSKLPYDILWKWNNDELPGRTKNIRISKWLPQADLLKHHKVKLFITQGGMQSTDEAIDAGVPLIGIPLLGDQWFNVEQYLFHKIGLYVDIETITEEKFGNAIEEILHNDSYRRNIRRLKTLIQDQPQTPLERAVWWTEYVIRNGGARHLRSPTATITWAEYLELELVFYILLTIISVSIAILFICCKIYRLLTRNSKKVKKS

SEQ ID NO: 7029 - protein, 880 aa, Solenopsis invicta
MRVLPVIFLWLHYLSVCNGYRLLGIFPLQSKSHFGMFEQLMKGLARKGHQVDIVSSFPLEKSYPNYTDLVTLPTTREVVNKLSYAEMKIFTTNPTYVIGTLGGNEVCKHLGNTKIKELAKQKNPSYDAIIVEVLAAQCFSIIAHILKIPMIGVTTRTLYPWVPQIIGQPENLAFVSNINLDFTTPMNFWQRLCNVLRTLYDKWFFDYLTTRVQDKLIRENFGPDMPSVREIERKLSLILVNSHITLDGIQPRTPAVVDVGGLHIHAENQTCCTQLQPELKKWMDDSKDGFIYFTFGSMVTIETFPHEFLRILYASLGKIAPVRVLIKVTAPEKLPSGLPENIHISPWMPQLMVLNYGIMRVLPLIFHWLSYLSVCDGYRLLGLFLIPRTSHFVMFEQLMKGLARKGHHVDMVSSYPLKKPYPNYTDLVTLPITREVVNKLSYAKMNILFTVNPMYVIGALGGNEVCEHLGNTKIKELAQPKNPSYDAVIMEVHGAQCFSIIAHLLKIPMIGVSTTGTLYSWLPQIIGQPENPAFVSNIILGFTTPMNFWQRLCNVLRTLYDKWFFDYLTTRVQDRLIRENFGPDMPSVRELERKLSLILVNSHITLHGVQPRTPAVVDVGGLHIHAENETLQPELKKWMDDSKDGFIYFTFGSMVTIETFPHEFLRILYASLGKIAPVRVLMKVTAPEKLPSGLPENIHISPWMPQLMVLRHSNIKAFITHGGLMGTQEAISCGVPMIGIPLFLDQFTNINAYVVKNIAIRLDINEITERSMDAALNAILQDPLYRESAQNLSRRFLDRPLNAIDTATYWIEYVIKYGENSLRSPAMDMSWLQLSLVDVIGFLLFCAIIIIAVIVFIVQFTLKLKHKDSNTLYSKKFKAN

SEQ ID NO: 7030 - protein, 521 aa, Trichoplusia ni
MRVFGHILFLYSIFIVNSNEAARILVVVPTASVSHQVVFRPLSQELAKRGHDVTIITTDPAFPKGGAPANLTEIDLHDLTYKGFIDEISKMPKGNKKDMLNNFRIFYKFWPKLFGKQLKDESVQRLIKDKNQKFDLLILEAGVRQALVFSHIFKAPVIQMSSFGVMFDNFQIIGAPTHPLLYPKILRQKLNNLTMYEKLTELYTHYMLEYMHYESRHLEDKILREIVGPDVPSVTELANNVDMLFLNVNPVFVGIRPVPPTVVFTSGLHQIQQKELPKDLKSYLDSSKNGVIYISFGTNMDPAGLPADRLQVLVKAFSQLPYDVLWKWNGDELPGRTANIRISKWLPQSDLLKHPKIKVFVTQGGLQSTDEAITAGVPLIGIPMWGDQWFNVEKYVTHNIGIGFDLDDMTVENFKNALLKIIKNDSYRQNVVRLRTLMHDEVQTPLERAVWWTEYVLRHGGAKHLRSPAANISWWEYLELELVLTLLAGLLVVLFTFGVISYKLFKYFFKPISAPVKLKSS

SEQ ID NO: 7031 - protein, 521 aa, Trichoplusia ni
MSVSAYILLFSFIFIVNINEAARILVVVPMPSISHQVVFRPLTQELAKRGHDVTVITADPAFPKGGAPANLTEIDLHDLSYTLFKQEMKKLPKGNKEDMLQTFILFMQFWPKIFGEQLKDAGVQRLIKDKNQKFDLLILEAGVRQALVFSHIFKAPVIQMSSFGVVYDNFEIIGAPTHPLIYPTVIREKLNNLTMFEKLREVYKYYTMESLYYANRHQEDKLIQDVLGPDVPSVVDLYDNVDMLFLNVHPVFEGIRPVPPTVVFTGGLHQIPPKELPKDLKTYLDSSKNGVIYISFGTNVDPTLLPADRIQVLVKAFSQLPYDVLWKWNGDELPGRTKNIKISKWLPQSDLLKHPNVKVFVTQGGLQSTDEAITAGVPLIGVPMIGDQWFNVEKYVSHKIGVRIDLEDITVESFKTNLLKVIEDDSYRQNIVRLRSLIHDEVQTPLERAVWWTEYVLRHGGAKHLRSPAANISWAEYLELELVLTLLAGLLVGLITFSLIVYKLYKYFITNLWSPVKVKST

SEQ ID NO: 7032 - protein, 519 aa, Papilio polytes
MMRLRISVLYLLCVTLSLIKSARILGVFPTPSISHQVVFRSLTHELARRGHELIVITTDPVHPKGQVPENLTEIDVHDLSYNIWNKGISELEDGSRDVNKQVLAMMGLNFEIFEKQMKSKSVQELLTYKNDYFDLILVEGMLSYTLGFSHIFKAPVILVSSFGGIWDNYVVMGVPTHPILYPSMVRDRLNNITMWEKIMQLKIEYNMRNIDTNNVMVNNLLKKLFGADTPPVTKLYDNVAMLFLNVHPIWDTNRPVPPGVIYMGGLHQNPIKELPKDLKSYLDSSRNGVIYFSLGTNVKPSYMPPEKLKAIVNVLSRLPYDVLWKWDNDELPGRSSNIKLSKWLPQSDLLRHPKIKLFITQGGLQSTDEAITAGVPLIGIPLLADQWYNVEKYVEHKIGVRIDIDTVTEEIFESAIRTVINDTSYRENIMRLRSIMSDQPQSPLERAVWWTEHVLRHGGARHLRSPAANISWSQYLELELVFVLLLVFIVLLIILCTVLKMIFNFLNSNLYAVVKMKRS

SEQ ID NO: 7033 - protein, 1978 aa, Trichuris suis
MVSVCLLTLSLFVESATAELSEWAFVGKEAFEEEVTKFFVTKLAPMKILHVSFSAFDRCPRNQSNPYGVSKVRMKVSCPQEDASGCGLHRTSGDITEVMIVDCQFAAEIVGYAVGRPLAVLCYQNSSSSTEEIPAGGLCKKWRYPGTELPQLQVPEHLKSPHSHVLLYQTTNLESFSGYGSNSHGVNTAHWKQNSYERTGFSGKGKLAQFGANSAVYLHTYGITKVLVEDTDDYTALPQFWVKRGKVDDDLLMRKLLKLNMYCLDEMIKAMVKTKQRLHTGYLRNKHNTDNAWIEGDIVHLHDETGGCFTPYPIHAEVKSRQYRWLALPYFITPIVFARSFSVCGLNRIGEDVTEIMIVECQFAGGAGRLVAALCYQNNMKTCGQSMEELPTPTGVLCKKWRYPGTELPRLEVPEHLKSPHSYILFYNPADMESFYGYRSSKDEFGRPKWPKNPYERTGFAGRGKLPEFGPNQALYILITRHTYGTTKLLIEDTDDYVGLPQFWVKKGKIDGALLMKKLLVLNEYCLDPMIKRMVETQKLYHIGYLKNKHNTDNAWLNGTIIHVLDETGGCFTPYPVHTEVLAGQYRWQVLPYFTTAKEFAQFFLATADRREWPPPTRHEFEDGAKRFFRRKLSPIKILDFIFSGFDTCPFKGKGPYGVGKARLKVSCPYQNASVCGLNRIGEDVTEIMIVECQFAGGAGRLVAALCYQNNMKTCGQSMEELPTPTGVLCKKWRYPGTELPRLEVPEHLKSPHSYILFYNPADMESFYGYRSSKDEFGRPKWPKNPYERTGFAGRGKLPEFGPNQALYILITRHTYGTTKLLIEDTDDYVGLPQFWVKKGKIDGALLMKKLLVLNEYCLDPMIKRMVETQKLYHIGYLKNKHNTDNAWLNGTIIHVLDETGGCFTPYPVHTEVLAGQYRWQVLPYFTTAKEFAQFFVANYNVIHPLAHVMRYAITITAVLAISFPMMRTATAKSILFMPAMAGASPSHVKSMIPLAENLLKDGHNVSMVQYYNEDREKVTHDTIHFIYMLISGRKLIDEEQQSTIWGTRGKDPWMIVKIASRASAACLRSMHTEGQKQFYKKLSAFNWDLLIVDNLFQPCGIIFSTNTKGQAWIDYSTTLLLKYVRRFRAVSVPPSVDLSPLVMEVFQPTIFKNRFLTSIELVLEYAVSFGLAVAMTTPWRGEGAMFSTKHVSNFHTNAVYSLASLSSKLDIALPQSMNTFSMDYACPKAAKLSREYQNFVEDPSSNGTIVFSFGHIADWKEAPIELIKAVSSAFESLSQYRIVWQFNGNVSTVSSSRHLRIEPWIPLPSLLQHPKTVLFITHSGMKSFREAICFTVPMVSIPLFGDQVRNTILTKFHGLGVSLDKTQLTEESLYKTILNVLHDGGYKRRITKLSAMLSDNLMDETAKGSFWISFYLRHPKSASHMRLKGATMTSVSYHSYDILTFICLAITLIAMLAISFNIKKTVKGKSILFMPAMGIPSHVKSMIPLAENLVKNGHNVSLVQYYEEESEKVTHDTIHFIYLFVSGGKLIDEEQQITIWRRRGMNPWAFAKTAWKTSAACLRSTYTEAQKEFYQKLSTLNWDLLIVDNLFQPCGIVFSTNTKGQAWIDYSTTPMLRHIRRVRAVGVPPSVDLSPIVMDEFQPLNFKNRLFSIFELILEHSLKLSFAFAMTTPWRAEGEIFSGKNVLDFHINAVYSLGSLSSKLDIALPQSMNTFSTDYACPKAAKLSHEYQNFVEDPSSNGTIVFSFGHIADWKEAPIELIKAVSSAFESLSQYRIVWQFNGNLSIVSSSPHLRIEPWIPLPSLLQHPKTVLFITHSGMKSFREAVCFTVPMVSIPLFGDQVRNTILTKFHRLGVSLDKTQLTEESFHKAILNVLHDGSYKHRITKLSAMLSDTLIDGTAEGGFWISAFLRHPNIASHIHVKGTSMTFLSLHSFDVLAFIKRVALLKVTTDYGEATKKDTACAVSVPPCTSSQGKA

SEQ ID NO: 7034 - protein, 431 aa, Stomoxys calcitrans
MFFENRRFYNHFLEFFMLYEWGKEACNHTLRSEALQKVLRNKVRYDVILLEQFNSDCMMGVAYMLQAPVIALSSCAMMPWHYERMSMPIIPSYIPALFMGQSEEMTFGGRIANWISFHGLNAMYNMFSIPAADALVRYKFGHDLPSVGELVKETSMMFVNQHFSLSGAKPLPPSVLELGGVHIQKSKPLDVDLQRFLDNADHGVVFISWGSMIRAETLPAAKRDAIVKAAKRLKQRVIWKWENDTLTNKPDNMFISKWLPQRDILCHPNVKVFMTHAGLMGSSEAAYCGVPVVATPMYGDQFLNAAAMKQRGMGVVLHYEDIEENNVIKAIKKVLEKQYFDNAKMVAYGFKHRPETALQSAVWWVEYVANTEGGPLLQSKAKHLSRFTYYSLDVYMIFGLIGLISMITWGVLMHKIRQSAKRNKANKVKSN

SEQ ID NO: 7035 - protein, 2680 aa, Trichuris suis
MSKCRTHDSYAMGNHCKLTLPYKNSLTNQAASVGATMVLLWLLTLSLLVQPAVQESREWRNERKGFQQAAINFFFSRMAPIKILHLKFSEYDKCPHKNRSPYGIGTFTLRVSCPNPDPSYCGLYGTRRDGSEVMVVECQFAAELNGRGRPIAALCYQNTTTGGRGSRGEAVGGEMCKKWRYPGTELPQLQLPGYLRSPDADVLWYDPANLESFDVSGSRSREVLTTRWIRNRYERTGFSGKGKLEEYGANMALYLLITRYSYGTTKVLIEDTDDRVALPRFWVKKDKIDADLIKRKVSKLNLYCKPSDINVMVKTRQKYHTGYLKNKHNTDNAWLEGPIIHLHDQSDQGCFSPYPVHADAKSRQYRDGYEVMVVDCQFAAELNHPGKVIAALCYQNTTTGGRGSRGEAFGGQMCKKWSYPGTQLPQLQLPEYLKSRNADILWYDPANLESFDAYYSKSREVRTTRWILNQYERTGFSGKGKLEEYGANAALYLLITRYSHGTTKVLMEYTDDRVTLPRFWVKKDKIDADLIKRKVSKLNLYCQQSDINVMVQTRQRFYTGYLKNKHNTDNAWLEGPIIHLHDQSHSGCFSPYPTHTDARSRKYIYYYTKRFRADLRDKLKPQEDDIDIIAQHDISGRSVKLPVLIDEVIAVPVGMSMDDICDKWRYPGSDFPQLQIPDYMKSVHSDVLAYMPPQIEKRGFSASFFDNSWPKNRHERTGFGGLGHLGKFGPNYVLYLVVTSKNGYELKIVTEESDEPFALPLFISEDKKVGKPFITKCAENIRDEMGNCSDAELRLIVKRRRVLHEEYLKDRLNTDNAWMEGLIVHLHDSNGRCFACKLTKKFSEKELHLRYLCGNPLPKRAPLGNALGNPTENDATDRKRATTFFFQVLQPIKILDITLTEFDKCSHKHRSPYGTGRFTLKVSCPNEDPSYCGLYGTRMDISEVMIVDCQLSATLNGHDNSRVLAALCYQDTIIGSRGSAQEVTARPLCKKWSYPGTELPQLQLPGYLKSPDADVLWYDPANMETFNEDNSKSQDVDTTRFIRNPYERTGFSGKGKLPEFGANVAMYLVLTRHTYGTTKVLIEDTDDYTALPQFWVKKGTVDGDFIKRKVLKLNKYCKESEIGLMVKESQKNKELHLFNSMKAERGGEVQKKDLKLQEEVTAEELCKKWSYPGTELPQLQLPGYLKSPDADVLWYDPANMETFNEDNSKSQDVDTTRFIRNPYERTGFSGKGKITRIWRERGYVPRTNQNKELHLFNSMKAERGGEVQKKDLKLQESYCGLYGTRRDASEVMIVDCQLSATLNGQDNSRVLAALCYQNTTTGSRGSAQKLPTEPLCKKWSYPGTELPQLQLPGYLKSPDSDVLWYDPANMETFNEDNSKSQDVDTTRFIRNPYERTGFSGKGKLPEFGANVALYLLITRHTYGTTKVLIEDTDDYTALPQFWVKKGTVDGDFIKRKVLKLNKYCKESEIRLMVKESQKEVTAEELCKKWSYPGTELPQLQLPGYLKSLDADILWYDTANLETFSEDNSKSQDVDTTRFIRNPYERTGFSGKGKITRIWRERGYVPRTNQFWVKQGTIDGDFIKRKVLKLNKYCKESEIGLMVKESQKYHRGYLKNKHNTDNAWLEGTIIHLHDDTGECFAHTAKFTCMHFQSATAALSEWAFVGKEAFEEEVSKFFVTKLAPIKILHVSFSAFDRCPRNQSNPYGVSKVRMKVSCPQEDASGCGLHRTSGDITEVMIVDCQFAAEIVGYAVGRPLAVLCYQNSTSSTELATADRREWPPPTRQEFEDGAKRFFRRKLSPIKILDFIFSGFDTCPFKGKGPYGVGKARLKVSCPYQNASVCGLNRIGEDVTEIMIVECQFAGGAGRLVAALCYQNNMKTCGQSMEELPTPTGVLCKKWRYPGTELPRLEVPEHLKSPHSYILFYNPADMESFYGYRSSKDEFGRPKWPKNPYERTGFAGRGKLPEFGPNQALYILITRHTYGTTKLLIEDTDDYVGLPQFWVKKGKIDGALLMKKLLVLNEYCLDPMIKRMVETQKLYHIGYLKNKHNTDNAWLNGTIIHVLDETGGCFTPYPVHTEVLAGQYRWQVLPYFTTAKEFAQFFVANYKALAVMGEDSTPYHRAGVRSSAAQLTGVMLYNEAAGGINQSRHTGLQPVYRQLHLCGIKTKEKNVGQTSLEPVRYHVVAISFPMMRTATAKSILFMPAMAGASHVKSMIPLAENLLKDGHNVSMVQYYNEEREKVTHDIIHFIYMLISGRKLIDEEQQSAIWGTRGADPWMILKITSRASGACLRSRYTQSQQEFYQQLSALNWDLLIVDNLFQPCGIIFSTNTKGQAWIDYSTTLLLKYVRRFRAVSVPPSVDLSPLVMEEFQPTIFKNRFLTLIELVLEHAVSFGLAVAMTTPWRGEGAMFSTKHVSNFHTNAVYSLASLSSKLDIALPQSMNTFSMDYACPKAAKLSREYQNFVEDPSSNGTIVFSFGHIADWKEAPIELIKAVSSAFESLSQYRIVWQFNGNVSTVSSSRHLRIEPWIPLPSLLQHPKTVLFITHSGIKSFREAVCFSVPMLSIPLFGDQVRNTILTKFHGLGISLDKTQLTEESFYKAILNMLHDGGYKRRITKLSAMLSDNLIDETAKGSFWISFYLRHPKSASHMRLKGATMTSLSYHSYDILAFICVLLFAFHCSIHS

SEQ ID NO: 7036 - protein, 556 aa, Ooceraea biroi
MKITVTSLAVIACLLVAVDGARILAIFPFQAKSHYNVYEPLLKRLSARGHEIVAVTHFPQRTRLANFTDVDVSSTLPSLVSSVPFSDFGEFTILQNIRYVTRYLGVEICEPVLNHPKVKRIIETRERFDMLIIEIFATDCFLGIAHALSIPKVVGAISSVALPWSNEVLRNPENPSYIPNWFSPYTGRMSFLERSINTVGLLITKLIYRTVSDGPSYEIARKHFGYDLPDFGVLRSRISLILTNGHPAVSTPRPFAPGFKEIGGIHIPISGPKPLPVDLRDYLDSHGRNGVIYFSLGSQIDPSTIPSQVFAALYRAFEQVPQQILWKCAEGRMPPLPGNVKCIEWAPQLSVLCHPNTRLFITHGGLLGSQEAVYCGVPILGIPLFGDQHLNMAYFEEKGLALRLNFRQLSYEQLSSSLNELLSNNSYTETARKASIQFRDYLVPPLEEAVYWIEHTLRHDADVLKTTATELTWYQYLLLDVPLDDCSYVWQVSAEERCEWVSNTEDCYSDSMIQYTILLFCYFKSENAATLAGGLSLVLLWLFYLFLILGSTADNL

SEQ ID NO: 7037 - protein, 1067 aa, Neodiprion lecontei
  MOD_RES (440)..(440): Any amino acid
MRMFGFNVLLVIIAAISPGEAYRILGVFPLNGKSHFVMFDQLMKGLAKRGHQVDVVSHFPLKKPLPNYTDVVDLSGTMPAVLNNMTYDFVKSVLTNSAVVPLLATQFGGELCDLMDHPRFREIIKNPPKDPPYDLVITEIFGSSCYLALGQHFNVPVVGVATCVLMPWTNDMVANPDNPAYIPNVLSDNFAPMNFFQRVKNALSLWKAKWDFNSYSAYQDDKIKKYLGPNSISLREAERNVSLILANSHYSLHGVRPYTTAVVEVGGLHIPQEVDALPKDLQKWLDDSKDGFVYMSFGSMIKIESFPKETLAALYNSLKKLAPVRVLIKIAKPQELPPGLPSNVLTLSWVPQVPVLNHKHVRVFVTHGGLMGTQEAIHCGVPMIGIPLFGDQMQNIKLYVRKKIAVALDHDQLTEEKLDTAFRTVLGDPSYLQAARKFSXEFRDRPMRALDTATFWIEYVIRHGGTNLKSPAMELTWGQTSLLDIYGALFLSVALSAYLVKVIITTLIAIVTGSDISSVKHSKKVQPVKAILYRQKKIRGHKMRLFGRIILFVVMLTISHDEAYRILGIFPLRTKSHFLMCEQLMKGLAKRGHVVDVVSPFPMKTPFPNYNQIINLEGSVIGLHNNLTYDFALSNLLDKAIIPVIATTYGNDLCDLMALPEFQKIIKNQEDSPYDLVIVELFGANCYAALGQHFKVPVVGVVTSAVWPWVNDVVANPDNPAYIPHTFSGLDVRMNFWQRFQNALTLLKVKFEYWYYSDKQNEQIKKYIGNHAPSLDEAMRNVSLLLVNSHYSLNGVRPITMAVVEVGGLHIADTPDPLPNDVQQWLDDSKDGFVYISFGSMVKIESYPTKSLNALYASLAKLAPVRVLMRISKPNELPPGLPSNVMTRPWISQFAVLRHKNIKVFVTHGGLMGTQEAIYCGVPMIGVPLFGDQMQNIEFYAEKKIAVSLDHENLTEENLDAAFSTVLNDPTYLKTAKRLSEEFRDRPMTAMETATFWVEYVVRYGGTNLKSPAMELTWWQTELFDVYGALLLAASLAVHLLTVVISKLSAIVLRTEKRSVPRSKKTK

SEQ ID NO: 7038 - protein, 535 aa, Caenorhabditis briggsae
MIIKHACFVLFLLLVGYGNSSKILIHNPIFGFSHVKFISKLADIIADHGHNVTLFQPYHLALKNLDGLVKNQNVEILNYYPSHYDELLKKETQTFPMFWDSHLIGNPVLRAFMLAPVLGGEFKKTAMEVLSDKNLINELKSKKFDVVMAETWELSGIYLAHLLDIPCIPMMSTVRYPIFNQIFGQPSFVGHVPQMGSVGAPEAGFFDRLNDVFETFWGIIAQERLNSYQNQFIEEAIGRSVPYWKDLVKQSPIYITNSNSYLDYAVPTTATIVHVGGITMDLKKMKNGEPLSEEYEEILQERESTVLISFGSVIRSFEMPENFKAGLIKMFESLPDVTFIWKYEKDDTEFKKRLPKNVNLKKWVPQPALLADHRVKVFVTHGGLGSIMEVAYTGKPAIVVPIFGDQNHNANMLARHGGALAYSKFDLPDGKKLAGVIKEMISNQKYKQNAETLFHVISNQPIDPTHNFLTHLDFAIKFPNLRSQVPEINQVGLIAHYYLDVVLFLCILGIAFAYLSFKLVKRILRRFAGEKTKTD

SEQ ID NO: 7039 - protein, 291 aa, Alligator mississippiensis
MTVPELFSHASIWLMKYDFVFEYPRPMMPNMVCIGGTICGQQKPLSQQFEAIVNASGEHGIVVFSLGSMVSEIPMKKAMEIAEALGKVPQTVIWRYTGEAPPNLSKNTKLVKWLPQNDLLAHPKTRAFITHGGSHGVYEGICNGVPMVLMPLFGDQMDNAMRVESRGAGVTLNILEMTSKDIADALNTVINDIRYKENIMRLSALHLDRPVHPLDLAVHWVEFVMRHKGAPHLRPAAHDLNWIQYHSLDVIAFLLAVVLITTFISFECCLFCCRKCFCKKGRDKSSKSKMQ

SEQ ID NO: 7040 - protein, 527 aa, Dictyocaulus viviparus
MQYRLLLLTILLVNSDSYKILVINPKFAYSHMNFMGKIADILVDAGHDVVTFQPIIDMYLVGNGTTKSRLIQTHMVKRLEAEMETLHRRETQEPVWTANVINPIGVLAFLPLLNELVENTLSEVLDRKEVLNQLKSENFDIAITELFDFIGFGVLEAIGVKNIIGAHSSGCVIEGTALSIGLPIFPSYMPASFGITSDLSDLSTRASNLLFTFLSWYFQTSVAKTAERVMMKKLGTTATPIWETVSNMTWVLINSEPLLDFSTPTLNNVVTVGGLGVHDPKPLNEEWNRTLSLRQRTVLISFGTVAPSMFMPNSMKQAIIKVIKSYPNITFIWKYEQDNEPIMNGMENLILSKWLPQADLLADKRLTLFITHGGAGSMMECATQGKPMIVVPLFGDQVRNARLIEKFGVGILLYKAQLWKSSILHDAIATIINDNSYRIAAQRLQRLLSKRPYSPREKLIKTIMLAGEFGNLPELHVTGRKLNLFVYHNIDLILLILLVTGMFTLIIFYVTSKLVMYCVGNEKIKGE

SEQ ID NO: 7041 - protein, 423 aa, Danaus plexippus
MTFSDVRGTSMFMRAIFRAQLETEEVQKIISERPKFDLILIESINRLGLSYSHLFKAPVILVSSFTAVFDNHNVMGSQTHPFLYPISFRDRIYNLSLTEKLKQLYIHFYVEYADYLNRKEENSFLKEIFGPQCPSLNEMNKNVDMLLLNIHPMWVDNQPVASNVIYMGGIHQLPEKKLPQELQKYLDSSKKGVIYVSFGTNVLSQVFPEDKLKIIINVVSRLPYDILWKWDKDELPIKASNIKLSKWLPQSDLLRHKNVKLFITQAGLQSTDEAITAGVPLVAIPMLGDQWFNAEKYEKFGIGIKLDVKTLTTDQLSKAIETVISDESYRHNISKLRGLMHDQPEPPLNRTMWWIEYVLRHGGAKHLRSAGANMSYWEYFETELILVILLGIFIIVAGISVVGFMLIHFISQFSKTTKKLKTN

SEQ ID NO: 7042 - protein, 530 aa, Mus musculus
MVPAAFPTSLPLCVCLLLASGLVQAGRLLVVPMDGSHWFDMQMVVEKLIQRGHEVVVVIPEVSWRLGKSLNCTVKTYSVSHTLEDLDREFKYFTYTQWKTPEQSIRSFMTGSARGFFELMFSHCRGLFNDKKLVEYLKQRSFDAVFLDPFDVCELIVAKYLSLPSVIFARLSFCYYLEEGAQCPSLLSYVPRLFSKYTDTMTFKERVWNHYMYIEDYVFCPYFFKTAVEIASEVLQTPVTMTDLFSPVSIWLLRTDFVLEFPRPVMPNMVFVGGMNCLQGKPLSKEFEAYVNASGEHGIVVFSLGSMVSEIPEKKAMEIAEALGRIPQTVLWRYTGTRPSNLAKNTILVKWLPQNDLLGHPKTRAFITHSGSHGIYEGICNGVPMVMMPLFGDQMDNAKRMETRGAGVTLNVLEMTADDLENALKTVINNKSYKENIMRLSSLHKDRPIEPLDLAVFWAEYVMRHKGAPHLRPAAHDLTWYQYHSLDVIGFLLAIVLTVDFIVFKCCAYGCRKCFGGKGRVKKSHKSKTH

SEQ ID NO: 7043 - protein, 981 aa, Ancylostoma ceylanicum
MLPFKTLLFLPLLFPCTFSYKMVLFVPDMANSQVLFNSRVAEALAKAGNDVTMVMISGMSDFDSKDVKIMKEVKLHRVNASFGMSRKELQERQSKIHYEDIPVWDSRVRENLRQMTGLLIKSCRKLVENKEFLEWLAGERFDLAFSHMYDICPIGLIHYAKIPSWIWLNSGALMDFVAYYMGVPIIPSYMPPIAMESSDHMNFLERTKSFIGHMLTSLLWKRLFADGETAIFRELIDPNFPDIVDVAKECPLVMVNSNELYDLPRPTLAKIINIGGIGIQLKDVKPLSPEFQQIVDAAEGIVVFSFGSVAAGHKMPMSWKLAFVDAFKRFPKYHFIWRYEGTDLQDEVSPNVHLFKWLPQSDLLQNPKTKAFLSHGGYNSMQEAISAGVPLVTIALFGDQPKNAKLAERHGFSVNIHKGDLSADTIADALNKLFKDPSYSQKIKRLSQMARKKPMLRLLILLLMIYSTCSYKMVIFVLDLSNSQLLFNKRVAEALADAGHDITIALIVPQSDLDNSDIKIKSGIKTHVVNAPINLTRKAMEERMEEYVFKESDSKMFGRFSLQISMILDTCRATVENKELLPWLKREKFDLAFAHMFDVCTVGLVHAARIPSWIWLNSGSVIDYVANLVGIPLIPSYVPPIMMSAAGEMNFLQRTKSLIGHGLMKIFWKRLIADPETELFRTHVSPDFPNLMELAAKCPLVMANTNELYEAARPTLAKVVNIGGIGMEVKDSKPIPEHIAKIINAGDVTVLFSFGSVFAAYRMPIEVKKAFLETFRRFPRYQFLWRYEKDDIKDMLPPNVHLFKWLPQSDLLRHPKTKVFITHGGFNSIQEAIHSGVPVISIPLVGDQPKNAALAEHHGFGITLRKGEISVESVSRALEEIITNTKYRDAVKRLSKMMDHKPVSPTHLLVKWAEFAAEFQTLENLEPAGNKLNFFQYHSLDVIFFLAFILILIVVFSIVLTKHLLRRVIALIFKSKKQKTT

SEQ ID NO: 7044 - protein, 407 aa, Caenorhabditis brenneri
MMKSNCEDFTSNKKVFDQLSTMNFDVAIAEPVSVCGLGYFDALGINKTILASSTTHYEGVVRNTGEPVDMSYVPVHGAYFNEKMDIFQRYTNWAAEHVMAGNLEKMFDEEMERYQKNLGVNVKHWRDLIPSASLMFTNANQYLDFPRPVLQKTVGIGGISVNMEKIKSEKLSEEIGEILDKRENNMLISFGSMVKSSTMPENWRNSILSSIKQFPNITFIWKYEKDDLEWANGVENVHFLKWVPQTALLNDKRMTAFLTHGGLGSTNELAYIGKPAIVVPIFGDQGRNAPMLARHGGALVLHKFDLEKEDILVDFIQKIVFDKSYSQKAQELSKLLNSSPFPPKELVVKHTEFVAQFGPLTQMDPYIRQLNWFQRTFADIYIIMFLFYSFVIIVPLYIFRLIYRFLL

SEQ ID NO: 7045 - protein, 524 aa, Aquila chrysaetos
MLVAVLVPFLCCLSLATAGKLLVIPMEGSHWLSMKEVLAELSKRGHEIVVIAPDSKMLIDSSGIYELKMYPVPFKKEEMEELMRSLSANCFSEEPFLMRFFNTWDNFRKTSAMFQTSCSSLLYNKEIMKYIKESKFDAIFTDPLTPCGQIIALHFSIPTVFFLRGIPCAIDIHAAQSPDPPSYIPRMFSLNTDHMTFPQRVKNFLISISETFTCSMVFSPFESLASDFLQKPITITQLLSHGSIWLKRLDFVFDYPMPVMPNMIFIGGINCGQKKPLSQEFEAIVNASGEHGIVVFSLGSMVSEIPMKKATEIADALASVPQTVLWRYTGEVPPNLPKNVKLVKWLPQNDLLAHPKTRAFITHGGSHGVYEGICNAVPMVLMPLFGDQMDNAKRVESRGAGLTLNILEMTSKDISTALKAVINDKKYKENIKRLSDLHLDRPIHPLDLAVHWVEFVMRHKGAPHLRPAAHDLNWIQYHSLDVIAFLLAVVLLSLFISFKCCLFCCRRCCCKKGRTRKPTKSKSH

SEQ ID NO: 7046 - protein, 527 aa, Caenorhabditis remanei
MLSIKFMFSLIIFNYVSPAPSLNILVYSPIFGGSHSKFMGNIADTLTQAGHNVTFLVPVADVTRRHEVGVKLTKNVMVVDKPNYNPDAAFNIDMDEVLRPLWTIQNRPSDFATCFTFFLEMMRTNCDDFTSNKKVFEELSKTKFDVAIAEPVSICGLGYFNALGIHKTILASSTTHYEGVVRNSGEPIDMSYVPVHGAYFDEKMSIFERYTNWAAEHVMAGNLEKMFDEEMEKYRKNLGVGVADWRELIPEASVFFTNANQYIDFPRPVIQKTVGIGGITVDMKKIKSEKLSEEIGKILDKRDHNMLISFGSMVKSSTMPEIWRNSILSAIKKFPNVTFIWKYESDDLKWADDTKNLHFLKWVPQTALLADSRLSGFLTHGGLGSTNELAYLGKPAIIVPIFGDQGRNGPMLARHGGAIVLNKMDLENSEVIADLMRKIVFDRSYAQKAADLANLLNSSPFSPKELVIKHTEFVAKFGPLTQMDPYIRQLNWFQRTFADIYILMFLFYSVVLIVPFLVVRKIYRLIF

SEQ ID NO: 7047 - protein, 531 aa, Rattus norvegicus
MGIQGFLQKLSGLLLLLCALPWAEGGKVLVFPMEGSHWLSMRDVVRELHARGHQAVVLAPEVTVHIKEEDFFTLQTYPVPYTKEEYRHHLLGHLQNFFETEFSLKLVLQRMAAVNNVSTFYVRSCRGLLHNTALIQSLNSSSFDVVLTDPFFPCGAVLAMYLRVPAVFFLQSMLCELEFEATNSPNPSSYIPRLLTLNSDHMSFLDRVKNMLYPVPWMYLCHVNYGSLARLASDLLQREVSVVEILRHASVWLLRKDFVFYYPRPFMPNMVFIGGINCANRKPLSQEFEAYVNASGEHGIVVFSLGSMVSEIPEKKAMEIAEALGRIPQTVLWRYTGTRPSNLAKNTILVKWLPQNDLLGHPKARAFITHSGSHGIYEGICNGVPMVMMPLFGDQMDNAKRMETRGAGVTLNVLEMTADDLENALKTVINNKSYKENIMRLSSLHKDRPIEPLDLAVFWVEYVMRHKGAPHLRPAAHDLTWYQYHSLDVIGFLLAIVLTVVFIVYKSCAYGCRKCFGGKGRVKKSHKSKTH

SEQ ID NO: 7048 - protein, 532 aa, Danio rerio
MTSGALLVCLLLCGVDVGWSGRVLVMPGEYSHWHNMRPVIEALVDKNHSVTVLVGSSSPTVPHTQKERFDYHVFKVNMDKEEADAAMRDMIHLFTNDTAAKYEGEFMMWKVMSKFVEFGDVYFRSLFDVGLLKTLRDSNYDVLFSDPMMPFSDLMAQKLNIPQVISMRATFAYAAERLCGQMPAPPSYVPAVALTDHLTDRMSFMERVENMLLYIVHSIAFPLVATFTFDGYYSEILGKPTTMCETMGKVDICLIRTYWDFEYPRPFPPNFKFVGGLHCKPAKPLSKELEEFVQSSGDHGVVVFSLGSMIKNLTSERANTIAAALGQIPQKVVWRYSGKTPETLAPNTKIYDWIPQNDLLGHPKTKAFITHGGTNGLYEAIYHGVPMVGLPLFGDQPDNLLHIKTKGAAVVLDIHTMGSKDLVDALKAVLNNPSYKESIMRLSRIHHDQPMKPLDQAVYWIEFVMRNKGAKHLRVQAHELSWYQYHCLDVAAFLLSITALITFLWVKACCFLFRRCVRKTRPERKTQKNKKE

SEQ ID NO: 7049 - protein, 517 aa, Acyrthosiphon pisum
MARMKRSTVQVSLSLCLCWLSVVLRTIPVGEASRILAVETIAGKSHWYFMSSVLRSLTDAGHTVTVFTPFPDGDRANYTEVDTSRDFPLKLDMDVMQTIREFRDPFMLTNLMSGLARFYCDAVYGNRKLAELIASEPRDRYDLLLIEPLGFDCVSYLADVLGLPVIYSIPSPMLTFTERLFTGHLSNPACVSNMLASHAVPNTFVQRFSNTALLTYGMIKTQYDQLVTLFTDPRPYDLAPTVNPSIIFQNTHYISESPRPITPNVIYVGGIHLKPPKTIPKDILDFIENSPQGVIFFTFGSTIKVSSLPENIEQSFKEALANVPQRVLWKYEGEMKDKPKNVMTRKWFPQREILLHPKVKLFISHGGMSGVYETVDGGVPVLGIPVFYDQPRNIEHLVHNGMAISMDLLSMTKEKLSNAISELINDEKYAKNAKIASNRFKDRPMTPQQSVVYWTEYVIRHKGAPHLKSQALNLTWYQYFLLDIMAVAFIFVFLVTFVVFKIFKCIKSFKNDKVKTQ

SEQ ID NO: 7050 - protein, 531 aa, Haliaeetus leucocephalus
MTVMWRNQIYAGLVLFLPFWSLAEGGKLLVVPQDGSHWLSMRVVLEKLWERGHEIVAVIPDATLLMKSSQSFTIKTYSVPYTQEFVDRYYHSIGEKSFDNSPFLEKFTILFSNISEMTSMFSSTCRHLLYDEELMKYLQESKFDAIMVDPVLPCGPIVAEYLSLPSVYFMRGLPCILDYKATQCPSPFSYVPRTFTSSSDHMTFMERVKNLLVGFSEPLFCYLFYFKYENLASEFLHREVTILELFSKASIWLMRYDFVFEYPRPIMPNMVYIGGINCEQKKPLSKEFEAIVNASGEHGIVVFSLGSMVSEIPMKKATEIADALASVPQTVLWRYTGEVPPNLPKNVKLVKWLPQNDLLAHPKTRAFITHGGSHGVYEGICNAVPMVLMPLFGDQMDNAKRVESRGAGLTLNILEMTSKDISTALKAVINDKKYKENIKRLSDLHLDRPIHPLDLAVHWVEFVMRHKGAPHLRPAAHDLNWIQYHSLDVIAFLLAVVLLSLFISLKCCLFCCRRCCCKKGRTRKPIKSKSH

SEQ ID NO: 7051 - protein, 533 aa, Ursus maritimus
MAAGFLVPLPALTGLLLFLCVGPWAEGGKVLVVPMDGSHWLSMKEAVQELHARGHQMVVVLAEVNMHIKKEDFFTLTTYATPFTQDEFDRLLLGQAYLVFERKSFLTMFLEIMERLKTTVVIFQRSCEELLHNKELIRHLNASSFDVVLTDPVYPCGAVLAKYLSLPAVFFLRTIPCDLDFEGTQCPNPSSYIPRLLTKNSDHMTFLQRVKNMLYPLALKYICHVSFAPYASLASEVLQREVSVVDIFRFASVWLFRGDFILDYPRPIMPNMVFIGGINCANRKPLSQEFEAYVNASGEHGIVVFSLGSMVSEIPEKKAMEIADALGKIPQTVLWRYTGTPPPNLAKNTRLVKWLPQNDLLGHPKTRAFITHSGSHGIYEGICNGVPMVMLPLFGDQMDNAKRMETRGAGVTLNVLEMTSEDLANALKTVINDKSYKENIMRLSSLHKDRPIEPLDLAVFWVEFVMRHKGAPHLRPAAHDLTWYQYHSLDVIGFLLAVVLGAVFIAYKCCVLGCRKCFGKKGRVKKSHKSKAQ

SEQ ID NO: 7052 - protein, 527 aa, Trachymyrmex zeteki
MKMLLSVLFVILAFDQIASSYRILGLFPLNGKSHWNMQEVLMKELARRGHQVDVVSHFPLKKPIPNYKDISLKGSVPEVTNNMTATQALSFSTPSMAALVQMVGSNTCTLFNHPKIQELIKNPPKDPPYDIVILEMFASPCYMAFGRHLKVPMVGTVASVFHDWLSEVSANPMNPSYIPNMFSGYSQHMSFKERLTNFLVTHYLSWEFHYYTNKQLKLVNEHFGMNLPHIKDLYNDISLYLVNSHHSLNGIRPMTTNVIEVGGLHLSDEGDPPSPEVQKWLDESKDGCIYFSFGSMVRIETFPKELLQQIYLSFEKIAPVRVLMKIVKKEELLPGLPKNVMTQSWFPQIAVLKHKNIRAFITHGGLHSTQETIYYGVPMIGIPLFGDQRVNIKNYINKKVAISLNSINDVTEEKLTSALNNILKDSSYRENVQKLSKLFFDRPMNALDTAIFWVEYVAKFRNVLQSPGIKLNWWQRNLVDVYAFIFTVIITVLYIALFIFRKLKKLLFGSRTCAKKDNIAMKSKKNK

SEQ ID NO: 7053 - protein, 632 aa, Pieris rapae
MPAYLQLCITALIYINHIQAYNILAVLPYPGRSHHVAFLPFFKELARRGNNVTLISHYPQEKPLKNLNEIILSEKEFQNWVPVTSPSYLTVLVAGVVLVYTGAASCKTLLDNRGVQDLWKNRTNFDVVLVEQFNSDCSLGLAYELGAPVVGITANSLMPQHYKRYGVPDNPSYTRNQVLGGRTRGTLFERVERTLIGIYINYMVDFASQFLDEYYLRQYFPNIPPIKELEKNIKFLLLYQHFVLNSALLLPSNVIEVAGHHVLEPKTLPKDLKRFIEESKHGVIYISFGSMIKATSLSKYKLQAILDVLEELPQRVIWKWDNDNLPFEMKKIYSSKWLPQNDILAHPNVVAFFSHCGQVGITEAIHYGVPVLGIPMFGDQISNAAAVEESGLGVQTAVNDLTKENLMKKFKTILDPDFRSNVKTLSRMYRDRPVSSLNASVFWTEFVARYPNATFRSPILNVPLYQYYCFDVLAVFILLLLLIFMLVKAAIRCLSITPNRPTMALIDRWLESTNIGLAVNRTETKLMLVDRASKFPRVTCNIPGINIVGRFIYLGSQISNDSSSVPEIKSRIGMAKDAMTRLGNIWKKRGIGINTKIRLIRVLVFPIFLYGVETWTILARERQRIDALEMWC

SEQ ID NO: 7054 - protein, 532 aa, Meleagris gallopavo
MTLRLCYPLATWTFILLIPGLSEGGKLLVVPMIGSHWLSMKEVAHKLAERGHEVVVLKPEVSWNTGDKHGHAYTVKTYPVSTKLEDLDNTFKVYLETHLKSMPFPKNVIAIFNDFTRLFESFYSQCKEMFSSMETLQYLNESSFDAVLTDPFFMCGATVANYLSLPFVFFMRGLPCNLHFEAAQCTSPLSYVPRTLSFNSDHMTFFQRVENTLISLLELFYCNAIYQDAIKFSSEILQREVTLLDLLNSASISIMRFDFVFEYPRPVMPNMVFVGGMNCAEKKPLPKEFEAIVNASGEHGIVVFSLGSMVSEIPMKKAMEIADALGSVPQTVLWRYTGEVPPNLPKNVKLVKWLPQNDLLAHPKTRAFITHGGSHGVYEGICNAVPMVIMPLFGDQMDNAKRVESRGAGLTLNILEMTSKDISDALKAVINDKKYKENIQRLSELHLDRPIHPLDLAVHWVEFVMRHKGAPHLRPAAHDLNWIQYHSLDVFAFLLAVVLLILFISVKCCMFCCRRCCFKKGRKSKSGKSKTH

SEQ ID NO: 7055 - protein, 531 aa, Pelodiscus sinensis
MVTALLLGYQLAAWTLLLIVPGFSEGGKLMVVPMDGSHWLSMRPVVENLSQRGHEVVVVIPEVRWQLGRAVNYTVKTYPVTYTREELDGSFQRYLYTHLKGQPFPFNVLSIYNTSVAVFSLLFTHCKSLFSQRELMHYLKHSDFDAVLTDPISLCGAIIANYFSLPPVFFMRGFPCNLHYKANQCPDPLSYVPRLFTMNSDHMTFSQRLKNVLVDSVEFLYCNGFYAEALKFASEVLQRDVTMLDLLNSSIWLMRYDFVFEYPRPVMPNMVFIGGINCGERKSLSEEFESIVNASGEHGFVVFSLGSMVSEIPMKKAQQFAEAFGTIPQTILWRYTGQPPPNLANNTKLIKWLPQNDLLAHPKARAFITHGGSHGIYEGICNGVPMVLMPLFGDQMDNAKRIESRGAGVTLNVLDMTSKDLSAALNTVIYDKSYKENIMRLSALHLDRPIHPLDLAVHWIEFVMRHKGAPHLRPAAHDLNWIQYHSLDVIAFLLAVVLVAMFISWKCCLFCCRKCFCKKGRVSKSSKTKAQ

SEQ ID NO: 7056 - protein, 443 aa, Anopheles gambiae
MLGGKNNVASVALLCLVFAIGHNSVVVESAKILGIFPTSSKSHWILGSALMKELAQDGHEVYYCPFPLKNAPKTYRDVKIDYKTGLFEAAMDKVFDNIDNSIVQKMTKLGNFANAITNTTLSSPEVQALLQSDETFDLVILEIFLDDALLGFADRFNCPVVGMSPFGASPWVNSLTGSPQPLSYVPHPMLSFTDKMNFWQRLGNVLFSAFDGTIISAMSNPIHQKHYDHYFPNATRSLDEMRRHGVSLVLINSHFSLSFPRPYLPNLIEIGGFHVNRKVNPLPEDIKSFIEQSEHGVIYFSMGSNLKPSKMDKQKRNDVIKVLSSLKQNIIWKWDDDTLVVDKKKFLIGKWFPQDDILAHPNVKLFITHGGLLSCTESIYHGVPIVGIPIFGDQLLNMARAEQSGWGIGVTYNELNEQTFSKAITTVLGDPRYVLLLNLVNSF

SEQ ID NO: 7057 - protein, 519 aa, Caenorhabditis remanei
MKYILFLTILISSTTPYNILVFCPLFGHSHSTFFGRLADILTEAGHNVTMFTPTIVDEFRNFSYTKLTKDVVYLDASPKLKAIGDLIAGNGRYWSQEFSLLEIPQSSRFFQSVANEQHNVLSENLPLLDKLKKKQFDLLLFETIFTCAIPLMDYLEIKAFAVAQSIAFESSSMRAIGEPVMPSHIPDLLTPSSDRMSLYERLLNTVTQTLQTFYKFSPEYYTSYSNPEERVYPLQRLPDASFVFTNSNPYVDFPRATIAKNIQIGGISVSMEAGKLEKEWDQILNLRNKNFLISFGSVTLSKDMTFESKVSLARAMKQFPDVTFIWKYEDSDTDKFAEGIQNIHFSKWVPQRELLADARLSAFMTHGGLGSVNEVSYMGKPSIMCPIMGDQMRNAKMLVRHNGSIEISKYDLGNSELVEEVIRKILYDESYKIAAQRLSDHLRNQPVSPKDLFLKHTEFAARFEKLPSLDPYSRQMGVLEYFMIDLALIVTVIVVVLCLFLYFLLKLVCRISGKRMKVE

SEQ ID NO: 7058 - protein, 511 aa, Trichuris suis
MRYAITITAVLAISFPMMRTATAKSILFMPAMAGASPSHVKSMIPLAENLLKDGHNVSMVQYYNEDREKVTHDTIHFIYMLISGRKLIDEEQQSTIWGTRGKDPWMIVKIASRASAACLRSMHTEGQKQFYKKLSAFNWDLLIVDNLFQPCGIIFSTNTKGQAWIDYSTTLLLKYVRRFRAVSVPPSVDLSPLVMEVFQPTIFKNRFLTSIELVLEYAVSFGLAVAMTTPWRGEGAMFSTNHVSNFHTNAVYSLASLSSKLDIALPQSMNTFSMDYACPKAAKLSREYQNFVEDPSSNGTIVFSFGHIADWKEAPIELIKAVSSAFESLSQYRIVWQFNGNVSTVSSSRHLRIEPWIPLPSLLQHPKTVLFITHSGMKSFREAICFTVPMVSIPLFGDQVRNTILTKFHGLGVSLDKTQLTEESLYKTILNVLHDGGYKRRITKLSAMLSDNLMDETAKGSFWISFYLRHPKSASHMRLKGATMTSVSYHSYDILTFICVLLFAFHCSIHS

SEQ ID NO: 7059 - protein, 523 aa, Aedes aegypti
MRLGSFYLLLWVVIDTALEHASSYRILGLFAHPGLSHFKVFHPIMRGLAEAGHQVTVVSYFPSLDKPHPNYEDFTFQGQELLTNAFSLEGFSRRTFLDNFVEFYELASWGFETCSSALNSPAMDKVLALHRSKPYDLIVTEFFSTDCMLGVSHVMKVPFVGLSSCALMPWHYGRVGLPDSPSYIPSEFSTFSERMSFWERFENWFVIRSVNLLYRIVEWNDNRLLTAKFGKGIPSVREIARNTSLILVNQHYTLSGARPLVPAVVEIGGVHIQNQKPLPTDVQKILDDSPEGVIVISWGSVLRASTLPQEKRDAIVNALRRLPMKVVWKWEDDSPKGLPKNVIVRKWLPQRDVLCHPNVRLFLSHGGLLGVSEAVHCSVPVVVTPIYGDQFLNAAALVNRGMGVTMHYNKITAEYVYQCIQTALHASIREAAIAVSEAYRHRPHTPVELAVWSIENVLKNGARRLEKSHGSELSMVVYNSWDVGLAFGIMMVLSLAAVVAISRKLSNVLFKKPKHASSKSKKL

SEQ ID NO: 7060 - protein, 533 aa, Felis catus
MAAGFLVPLPVLTGLLLFLCVGPRAEGGKVLVLPTDGSHWLSMKKALQELHARGHEIVVVSPEVNLHIKKEDFFTLRTYAISYTQEEFNDFFLGHSYLVFEKGHFLKMFLKIMENLKTASFIFQRSCKELMHNKELIGHLNSSSFDVVLTDPVYPCGAVLAKYLSLPAVFFLRSVPCDLDFEGTQCPNPSSYIPRLLTMNSDHMTFLQRVKNMLYPLSLKYICHIAFTPYASLASELLQREVSVVDVFSSASMWLFRGDFVLDYPRPVMPNMVFIGGINCANRKPLSQEFEAYVNASGEHGIVVFSLGSMVSAIPKEKAMEIADALGKIPQTVLWRYTGTPPPNLAKNTILVKWLPQNDLLGHPKARAFITHSGSHGIYEGICNGVPMVMLPLFGDQMDNAKRMETRGAGLTLNVLEMTSEDLANGLKAVINDKSYKENIMRLSSLHKDRPIEPLDLAVFWVEFVMRHKGAPHLRPAAHDLTWYQYHSVDVIGFLLAIVLGIVFITYKCCAFGCRKCFGRKGRVKKSHKSKTH

SEQ ID NO: 7061 - protein, 518 aa, Trichoplusia ni
MAVFLSILACILLVNTNEAARILGVFPTPSISHQVVFRPLIQELVRRGHNITVITTDPAFPKGKAPANLKEIDVHDISYNLWRKKLVSRKNNNDDILTQHSILLDLFVSMVDAQLKDENVKRIIHDKEQQFDLLILEACVRPALGYSHRFKAPVILMSSLGGLPYNFETIGIPVHPIHYPSIPRRRINNVSLLEKISELYVYYKNELLVRGYRSIEHEMLKKHFGPDTPPITELNKNADMLFLNINPVFEGIRPVPPNIIYMGGLHQNPSKDLPVDLKSYLDSSKNGVIYISFGTNVDTNSLPADKIQVLVKTVSQLPYDVLWKWKGDELPGRTDNIRISKWFPQSDLLRHPKIKAFVTQGGLQSTDEAITAGVPLVVMPLLSDQFFNAERYETHKIGIRVDLATVTEDQFKGALLNVIEDDSYRENIAKLRTLMLDMVQTPLERAVWWTEYVLRHGGAKHLKSPTANMTWAEYIELDLVLTGLAGLSVVMIVFIIFLRKLHKYVRCKIVAASKLKRN

SEQ ID NO: 7062 - protein, 424 aa, Dendroctonus ponderosae
MFLNFIFFVNFFNILLQECAAARILVFIPLPFYSHQSVYKPLWNELANRGHKITLLTLNPMQPHENITQIDLSAVYTRLEKAKFFDVLSSGEQSLENVLHVFDTVLEAADEELSHPEVKGLIAGNQSFDLVITEYYLTVGAAFAHKFQCPFIGKSSNYPQLENVHNIIGNPTHPILYPALDLGFSGELNLKLRLGRTLFYLAWNAYVTYSIRPRENELIQKHFGSEFPLVENLNKKASLLFINVNPVFHIQRPLNAQTINVGGGLHIQPPKSLPEDIQGFLDDAQHGAIYFSLGSSIRSSQLPGSTKSAIIQTFGQLPYKFLWKYEKELNDSMEVPKNVHLSNWLPQQDILRHKNIKLFITQGGLQSLEESLFIGVPVLVLPFYGDQISNAQMVVEHGFGLALDRRNVTVRNFMSAILKLITST

SEQ ID NO: 7063 - protein, 400 aa, Onthophagus taurus
MKANVISLFQILLLFFHITIIKSANILVVFPSPAESHFRVFALFFDQLALKGHDVDVLSHFPRNTPLRGYNDLSLKGHIMCSRVMNTTAAKQLKKTKKKYDLMITHMVKSHCMYGFADFFKIPIITITSSSILPWLPDVIVWFSFHSTVAANNYHKEFYGKKSTDLDKIVKKTNLMLIASHFSFHQSRPRPPNFIEIAGIHIKANQSLNEEFKKYLEISTNLKGVIYFSFGSYFNTETFPGHILQAFFDVFENLPYKVLWKGDIKKFPKTYNIPKNIHFIPRMPQIPILCSSKVNLFITHGGLSSTLETIYCGKPVLTIPIWLDQLSNANLLKAKGVGRSILFHEINKENFKAELEEVLENPKYSKNVKILSEIFRDRLHRWKQPFIGLNTSSDIKGLII

SEQ ID NO: 7064 - protein, 473 aa, Toxocara canis
MTQGKSHAGSFMPLLEELTQQGHNVTLFMDTYDNVSFAGRVNEWYINVKGHTNPHANFRYESDMWRDRFTFMTLTKPFYFGAQSCEHVLADYREEFNRLVNYPWSLILTDSLFAVSAYGISELSGAHYVLMHSSDVESGHGTLKGYARNYVMTPRSYLEFDAAEYDIRRFMDRVWTAYEWFGSWTTFTMVSNRYMRHALSPVLPNFDISRYSANSAMSFTDMPLHLHLPLSTNNELFSYGAYCRPYKPLNGEIADFVEDSQSKGTILIAFGTIVRWSTAPKEKLNAFVAALNEVPEYRILWAYSGPKLYTKKHIKIVKWLSQNDILNHNRTKLFITHGGLKSVKETTCATVPTLQMPMFAEQVRNSWLTRHHGFGRMINKVNFTSASLVESIREMITNPDYKNNVKRLRRFYDDTPIPALKEAAFKINRLLKYGGRMPDYFYTRSTKLSFFTFLNIDLLVLFPALSIFLLSIR

SEQ ID NO: 7065 - protein, 514 aa, Tribolium castaneum
MLKTSIFPVLLIFLVPELPETHSANILGILPYPGKSHSILFETLLKRLAEKGHEVDYVTFFPSRNFTQRYNELSLYGVVPNYVNNVSIDQLQNQSLYQAVKFMTRIAGADAFSTIMKTPVLQNLRNTTNKYDLIIVHSFGCDIALGFGYLFNAPVVAYVTSVNLPWIDDRIGNPDNPAYIQSYLSRSSAKMKLYERIENTIYWIMTRFWFSFFSGRSDRLVKKFFGPTTPSLENLIRNTSLVLVNSHFSMQQARPLVPNFIEVGGLHIREPQPLPKDLENLVSNNTFGVVYLSMGSMVRTESFKPEILQAMFDAFAELPYTVLWKASPEKFPKGLKIPENIHFKTWMPQIDILCHPNVKLFISHGGLLGSQEAVYCAIPRIGIPFFDDQELNIVTSEKLGIAKKLSYGHINKNTLLNTITELFEDLKYRQNVERISKIFKDRPMSPLDTAIYWVEYVIRYKGAPHLRSVGADLPWYQFYLVDVTIILLFGSILIIYILKYALRCIDSNQKHKFE

SEQ ID NO: 7066 - protein, 265 aa, Egretta garzetta
MPNMVYIGGINCEQKKPLSKEFEAIVNASGEHGIVVFSLGSMVSEIPMKKATEIAEALGSVPQTVLWRYTGEVPPNLPKNVKLVKWLPQNDLLAHPKTRAFITHGGSHGVYEGICNAVPMVLMPLFGDQMDNAKRVESRGAGLTLNILKMTSKDISVALKAVINDKKYKENIKRLSDLHLDRPIPPLDLAVHWVEFVMRHKGAPHLRPAAHDLNWIQYHSLDVIAFLLAVVLLSLFISLKCCLFCCRRCCCKKGRTRKPIKSKSH

SEQ ID NO: 7067 - protein, 400 aa, Necator americanus
MEDAEKDVQFSSGVRVANSWTTSPMSSVYQPFLVMFPVCGKFTLLLGDFTIIHVTLALMMESSDEMDFIERTKSFIGHNIYNLVYPWMVPNKETQMFRDHWDPEFPDIMDLLRNCPLVMVNSNELYELPRPTLAKVVNIGGVGVQYKDAKPLQDEFKKIADTGKGMVIMSFGSVAQSELMPEHWKTALLNAFARFTDYEFIIRYASDDLKDRLPKNVHAYRWLPQADLLLHPSTKAFISHGGYNSLQESINSGVPLITVALFGDQFKNSKIAAKHGFAVNIKKATLDESSIVAALKEILSNDRYSKNVRRLSLMVKRKPVNSTHLLVKWTEFLAEFQTLDNLTPAGNNLNFFQYFSLDVIGTLFLLTLVVTYLIFKLLASIIRCILSRSRKERRIVWFVM

SEQ ID NO: 7068 - protein, 533 aa, Physeter catodon
MSLGLWLPGQVLRGLLLCLCVGRWAEAGKVLVVPMEGSHWLSMREAVRELHARGHQAVVLSPEVNMHIKAEDFFTMKTYAIPYTQDEFDYIVTGKTHLLFERIHFLTLFLETMASLKNVSLVFQRSCEQLFYTKDLIRHLNASSFDVVLTDPVYPCGAVLAKYLSIPAVFFLRSIPCDLDIEGTACPNPFSYVPRLLTMNSDHMTFFQRVKNVLYPLTLKYICQVSFTPYARIASDLLHREVSLVDIFGSASIWLFRGDFVMDYPRPIMPNMVFIGGINCANRKPLSREFEAYVNASGEHGIVVFSLGSMVSEIPEQKATEIADALGKIPQTVLWRYTGTPPPNLAKNTKLVKWLPQNDLLGHPKTRAFITHSGSHGVYEGICNGVPMVMMPLFGDQMDNAKRMETRGAGVTLNILEMSSEDLEKALKTVISDKSYKENIMRLSSLHKDRPMEPLDLAVFWVEFVMRHKGAPHLRPAAHDLTWYQYYSLDVIGFLLAVVLTVVFITFKGCAFAFRKCFRKKERVKKSHKSKAH

SEQ ID NO: 7069 - protein, 527 aa, Ancylostoma ceylanicum
MLRLLILLLMIYSTCSYKMVIFVLDLSNSQLLFNKRVAEALADAGHDITIALIVPQSDLDNSDIKIKSGIKTHVVNAPINLTRKAMEERMEEYVFKESDSKMFGRFSLQISMILDTCRATVENKELLPWLKREKFDLAFAHMFDVCTVGLVHAARIPSWIWLNSGSVIDYVANLVGIPLIPSYVPPIMMSAAGEMNFLQRTKSLIGHGLMKIFWKRLIADPETELFRTHVSPDFPNLMELAAKCPLVMANTNELYEAARPTLAKVVNIGGIGMEVKDSKPIPEHIAKIINAGDVTVLFSFGSVFAAYRMPIEVKKAFLETFRRFPRYQFLWRYEKDDIKDMLPPNVHLFKWLPQSDLLRHPKTKVFITHGGFNSIQEAIHSGVPVISIPLVGDQPKNAALAEHHGFGITLRKGEISVESVSRALEEIITNTKYRDAVKRLSKMMDHKPVSPTHLLVKWAEFAAEFQTLENLEPAGNKLNFFQYHSLDVIFFLAFILILIVVFSIVLTKHLLRRVIALIFKSKKQKTT

SEQ ID NO: 7070 - protein, 535 aa, Sus scrofa
MAMGFQAPLPMLAGLLLCLCVVVPWAEGGKVLVVPMEGSHWLSMRKAVQELHARGHQAVVLSPEVNMHIKAEDFFTVKSYATPYTQDEFDDLMVRHLHLLFEKANFLTMFWTTMVSLKKVFLMFERSCEELLNNKDLIRDLNATSGFDAVFTDPFLPCGPIVAQYLGLPAVFFLNGLPCQLDFQGTQCPNPLSYVPRPLSGNSDHMTFLERVKNMLVALSEGFLCSAVYSPYAPLASEVLQRDVTVQDLMSSASVWLIRNDFVNNYPRPIMPNTVFIGGINCASKTPLSQEFEAYVNASGEHGIVVFSLGSMVSEIPEQKAMEIADALGKIPQTVLWRYTGPAPPNLAKNTKLVKWLPQNDLLGHPKARAFITHSGSHGIYEGICNGVPMVMMPLFGDQMDNAKRMETRGAGVTLNVLEMTSKDLENALNTVIKDKSYKENIMRLSSLHKDRPIEPLDLAVFWVEFVMRHKGAPHLRPAAHDLTWYQYHSLDVIGFLLAVGLTVVFIAFKCCVFAYRKCFGKKGRVKKSHKSKTH

SEQ ID NO: 7071 - protein, 260 aa, Papilio polytes
MFQELESWMNSSKNGVIYMSFGSNVSNKGLSMKTKHILFNVLSNLPYDVLLKWDEEVLIRHTKNINIGKWFPQSDLLRKYLLQLYLLVNLCSKFCLFTDHPKVKLFITQGGLQSTDEAIAAGVPMVGVPMFVDQAYNTEQYERFNIGIKLDFNDLTEEVFKKAINKVIGDENVDLVHIFYTFYRYRNNIMQLRNIINDQPQSPLDKAIWWTEYVIRNKGAKHLRSPTANISWMKYLEIELVSTVTIILLIFFTCLILIAK

SEQ ID NO: 7072 - protein, 522 aa, Echinops telfairi
MAVSRAGLLCLLVTGPLLSEAAQILTLSLLGGSHYLLMDQVSQILQDHGHNVTMLQQDGISLISDFKKGNKPYQVISWLPPENYQEEFMNYFNFFVEEAFNGRSTFEDYLKLIESLATQCTHLLRRKDITDSLKNENFDLVVVEIFDYCPLLVVEKLGKPFVAILPSSFNTVDIGLPSPVSYVPIYYSLLTDRMDFWGRVKNLVKFFDFSKKQWQVHSQYDNIIREHFPEDSRPVLFDLVRKAELWFINSDFAFDFARPLLPNTVYVGGLMAKAVRPVPQDLENFIAKFGDSGFILVTLGSMLHNYQIQDILKEMNKAFAHRPQGVIWRYKTSEWPKDVQLAANVKLVDWLPQSDLLAHPSIRLFVTHGGQNSIMEAIQHGVPVVGIPLFGDQPENLVRVEAKHLGVTMSLKQLKAETLARKMKQVMEDKRYKSAAMAASIIRRSHPLSPSQRLVGWINHILQTGNGAHLKPFVFQQPWYEQYLLDVLLFLLGVALGSMWLCGKLLRVMASWLRGSQKLKQM

SEQ ID NO: 7073 - protein, 530 aa, Drosophila yakuba
MGRICSGTALGLLLIGLLLLFSANADEGVQSSRILAVFPFPGRSQYIFAEQFLKELAHRGHNVTVINTFGSDEAEPNFRVIGAKKIHEIMAAFGNADYNQAATQWKVLTMTTEFLNLLTTSVLDEPAVKNLLHSGEKFDLVIMETVQTEALFGLSQHFGAETIGISSYGTDTHIDELMGNLSPLSYNPMLLSSRTERMDIKDRLRNVLEACVMWLHKRVVHLPTQRDLYVKYFPTARKSLDEVLDSFSLMLLGQHFSLSYPRPYLPNMIEVGGLHLQQQRKVQPLAKELSEFVEQSEKGVIYFSMGSNIKSKDLPPATRKVLMETFASLPQRVLWKFEDDQLPEKPSNVFISKWFPQPDILAHPNVKLFITHGGLLSTIESIYFGKPVLGLPIFYDQHLNVQRAKQAGYGLSADIWSANATELTSLIQELLSNASYAAAAQTKSKLFRDQKETALERAIWWTEYVLRHKGAKHLRCASRDLDFIQFHGLDTWGLLIAVTFASILIVVVALKCLQRGLTYIIANRRKLKTQ

SEQ ID NO: 7074 - protein, 550 aa, Caenorhabditis remanei
MHVNKLLSFLSFSLLGFSSGKNILMFNPMFGFSHVKFVSFMADVIADHGHNVTLFQPFHNAMKNTEGLVKNKNIEIINYYPNHYDELVNLETQTFPMFWDSHLMNNPILQAFMMPRALAGEFERTSVQLLKDKQTLDELKNRNFDVMIVETFELTGFCEFSIKIIINIVQFSDIAHLLEIPAIPIMSSVRFPCFNDLFGQPSGLGYYPHIGSKMAPEAGFLDRLNDIYRNFFMYVMMHRMANIQNDYVENAIGRPVPNWKDLVSRSPIFITNSNPYLDYAVPTTAAIVHAGGITMDLKKMKHVGKLPEEYVPILDERESTVLISFGSVIRSFQMPENFKAGIIQMFESLPDVTFIWKYEKDDVEFQKRLPKNVHLKKWVPQPALLADERVKVFVTHGGLGSTMEVAYSGKPALMVPIFGDQPLNAYMLERHGGAIAYDKFDLADGYKLTKTLKDMVSNPKYFKNAKELLEVLSNQPIDPKLNLIKHLEFAMQFPNLRAQVPAINHVGIIAHYYLDAIAFLVFVGGLTVYIGFLILRKLPIRIIPNKAKND

SEQ ID NO: 7075 - protein, 530 aa, Dipodomys ordii
MAPVVLPALLPVCACLLLASGSAQAGKLLVVPMHGSHWLSMRSVVEKLIHRGHEVVAVVPEVIWQPGRSLNFTVKMYSTSHTRDNLDQKFKDFADAQWKTRDNNMFALATGSSKVFFDITFSRCKSLFNDKELIEYLRESSFDAVFLDPFDMCGLIVARYFSLPSVFFSRGAFCSNLEEGTQCPSPPSYGPRSFQGLSHTMTFRERVWNHISFLTEHLFCPIFFEKAIEAASEILQTPVTTYDLFSQVSIWLLRTDFVLDFPRPVMPNMVYVGGINCHRGKPLPKEFEAYINASGEHGIVVFSLGSMVAEIPEKKAMAIAEALGQIPQTVLWRYTGSRPSNLANNTILVKWLPQNDLLGHPKTRAFITHSGSHGIYEGICNGVPMVMMPLFGDQMDNAKRMETRGAGVTLNVLEMTSDDLANALKAVINDKSYKENIMRLSSLHKDRPIEPLDLAVFWVEYVMRHKGAPHLRPAAHDLTWYQYHSLDVIGFLLAIVLTVAFLIFKCCAFGCRKCFGKKGRVKKSHKTKAH

SEQ ID NO: 7076 - protein, 454 aa, Onthophagus taurus
MFKGMVKPLLNRGHEIDFVSFYPLNVKHKRYSDIDLSTCFSVFKNNITVLKSAIGDLGLLQDVMFKLNGYNLMDAVLKSPQLRELRNTTKKYDLILRHVFLSDPLEIYSHIFKAPSIGIITSFNLPWTSDLVGIPDSPAFIPSFNGPYGEKMTFIERAHNILIYTYQKYQYWSLQKRFTELVWKYFGRNMPTVEELIGKTSLIFCNSHYTIHQSRSMPPNFIEIGGVHIPEKNNFTLPKNLQLSVDSSKQGIIYFSFGSMVRSTSFNRKTLSTMFEALGKQPYKVFWKGVKEEIPDDLKIPDNIIFETWMPQLDILCNPNTKLFISHGGLFGVQEAIYCGLPILGIPFFADQASNIQFLVEKNVAKLIYVDDIPEGNLFKEYVETLLKPQFKQNAENLSKLFRDRPMSPIKTAIYWIEYVIKHNGAPHLKSFQLIKLALKVKGIQYICNSKKRK

SEQ ID NO: 7077 - protein, 521 aa, Helicoverpa armigera
MSVSVLNIFVVCGLFISSNEAARILAVFPVPSISHQVVFRPLTQELARRGHEVTVITPDPVFPNGGAPPNLTEIDVHDVSYNIWKESFIKAASKGVKDDSYSQMEIIMSTFSRVFDAQLKTDVVQNLIKDKSKQFDLLLLEACVRPALAFSHIYKNVPVILVSSLGAAPGNYEVIGASEHPILYPNLFRKRLYNLSFWEKIGELYEHYRIVKFFESNTVLENQVLRDNFGREIPTVHELGNNVDMLFLNINPVFEGIRPVPPSVVYMGGLHQKPAKELPTDLKTYLDSSKNGVIYISFGTNVAPSMLPPERIQILVKVFSQLPYDVLWKWDKDELPGRSKNIRISKWLPQSDLLRHPKVKLFITQGGLQSTDEAITAGVPLIGVPMLADQWFNVEKYVYLKIGLQLDLETLTEEQFRNAINTIVGDDSYKRNIEKLRSVMEDQPMKPLERAVWWTEHVLRHGGARHLRSPAANMSWAEYLELELVLIVLAGLLAILTAIFGAIYALCRCFTKEVSVKHKSH

SEQ ID NO: 7078 - protein, 522 aa, Bombus impatiens
MKHQKALFCVLLALFIHANDASRILGIFPYNGKSHFRMFDVLCKELVKRGHQVDVISHFPLKTPLANYTDVVDLNGTLKTVVNGITTDYGKYIQRSVTYFVATDFGNNLCDLMKQEKMQKFIKNPPNDPPYDLIIVEYFGSPCYIGFGQLLKAPVAIVMSSMQMSFIDDIMGNPTSYAFFSGFYNDNAVVNTFFDRLWNFLINYKNTLIFHHYTAEQTDMMKKYLGLPNIPDVRELEKTVSLAIVNSHYSYYGIRPVTPAVIEVGGLHVEADKSKLSPKLKEWLDMASHGVVYFSLGSLMNVETLPTETILQIYASLAKISPVKVLLKSANATKLPPGLPNNVLTLPWIPQVAVLKHPNTRVFVTHGGLMGTQEASYYGVPMIGMPVFGDQIKNINVLVEKNVAVLVDIDDITEHSMDAALNAVLHDPRYRESAKTLSKMFRDRPMSPLDTAVYWIEYVLRNGPDSLRSAAVKLPWWKLHLLDVFVFLFACFTFAIYLLIVSLNIVLTSFHKRAARTEKKLN

SEQ ID NO: 7079 - protein, 506 aa, Strigamia maritima
MYILNAQLLKLSLVLLFGCENLYCYNIIHIFPFAPRSHKNVFDPLITELAKRGHNVTIVTSYKNSHPEKNINEIFIEHSSSFENSKFQQDLFSSVNRHPLATMSLFKKIFLPMCTGYLQHPKIKQLLNEGKQYDIVILNAFLNECTLATAPLLGKNIITQSPASLCTWCSTASVPQPPSYVPSLIFPYTSNMNFLQRLNNAVTIQGLQLLYKYQVLSSLQTEVAKHLPDNPSITEASKLVSLFLTNCDPVLISPRQQMPYVVNVGGMHCQKAKPLPKDLEDFVQSSGESGFIYFSLGSNAQSRYLPDNVKKSLLDTFSKVKQKVVWKYEEELVNGPSNVKIVKWAPQQDLLGHSKIQLFITHGGLLSMQESVYHAVPVVAVPLFGDQGSNVARVQELEIGVKVDFHNISGSCMLDAVNTFLLYLQIQKNMLKYSALFRDRPVEPVEEAASWVEYTVKHNGAWHLKSSADDLNFFQYFLLDIMTFILIIFISAVCLLAKFARFLAKL

SEQ ID NO: 7080 - protein, 505 aa, Mus musculus
MAAHRSWLLVSFFLLEVLLLEAAKILTISTLSASHYILMNRVSQILQGGGHDVIKLLYEGGDIPDFRKENSSYQVINWRLPEDQQKTFENRWHRLIDEYAYGSHLLSRKDIMELLQKENFDLVLLDSMDLCSFLIVEKLGKRFVSFLPFQFSYMDFGLPNAPLSYAPVYGSGLTDQMDFWGRVKNILMFFHFTKKRRDIFSQYGNTVQEHFAEGSQPVLSDLLLKAELWFVNSDFALDFARPLFPNTVYVGGLLDKPVQPIPQDLEDFISQFGDSGFVLVALGSVVSMIQSKEIIKEMNSAFAHLPQGVLWTCKSSHWPKDVSLAPNVKIMDWLPQIDLLAHPSIRLFVTHGGMNSVMEAVHHGVPMVGIPFFGDQPENMVRVEAKNLGVSIQLQTLKAESFLLTMKEVIEDQRYKTAAMASKVIRQSHPLTPAQRLVGWIDHILQTGGAAHLKPYAFQQPWHEQYMLDVFLFLLGLTLGTLWLSVKVLVAVTRYLSISRKVKQA

SEQ ID NO: 7081 - protein, 529 aa, Galeopterus variegatus
MAPALVTGPLLLCVCLLLTGGLAEAGKLLVVPMDGSHWFTMRPVVERLMHRGHDLVLVTPEVSWQLGKLSNYTVKTYSISYTLKDLDREFMVFANSQWKTRGQSLFSILTSSYNTIFELLFSHCRSLFNDRKLIEYLKESSFDAVFLDSFDMCGLIVAKYFSLPSVVFARGIYCHYLEEGAQSPSPLSYIPRGFSGFSDVMTFKERVWNHIFHLEEQFFCPIFLKSALDVASEILQTPVTASDLFSHTSIWLLRTDFVLDYPRPVMPNMFFVGGINCNPCSPLPQEFEAYVNASGEHGIVVFSLGSMVSEIPEKKAMAIADALGKIPQTVLWRYTGPRPSNLANNTILVKWLPQNDLLGHPKTRAFITHSGSHGIYEGICNGVPMVMMPLFGDQMDNAKRMETKGAGVTLNVLEMTSEDLENALKAVINDKSYKENIMHLSSLHKDRPIEPLDLAVFWIEFVMRHKGAPHLRPAAHDLTWYQYHSLDVIGFLLAIVLTVAFIAFKCCAYGCRKCFGKKGRVKARKSKAQ

SEQ ID NO: 7082 - protein, 219 aa, Homo sapiens
HLLCHRFFKNALEIASEILQTPVTEYDLYSHTSIWLLRTDFVLDYPKPVMPNMIFIGGINCHQGKPLPMEFEAYINASGEHGIVVFSLGSMVSEIPEKKAMAIADALGKIPQTVLWRYTGTRPSNLANNTILVKWLPQNDLLGHPMTRAFITHAGSHGVYESICNGVPMVMMPLFGDQMDNAKRMETKGAGVTLNVLEMTSEDLENALKAVINDKRKKQ

SEQ ID NO: 7083 - protein, 220 aa, Papilio machaon
MFDFEDKQNKVLKRIFGPDVPTMNELKNEVEMLFLNINPIWEGNYPVPPAVVHMGGLHQKPPKALPKDLSQLLDDSSNGVIYFSFGTNVRPSLLDPAKIDMFHKVFAELPYNVIWKWDDESLKPRSDNVRIFKWLPQSDLLRHPNIKLFITQGGLQSTDEAITAGVPLVGIPMLGDQWYNVEKYVYHKIGVRLDFEELTEEKLKKALLDVAGNERLVLPN

SEQ ID NO: 7084 - protein, 533 aa, Aethina tumida
MAMKVISILCALLTVSQCSNILFVTIFPNPSRQALFQPIWKELSLRGHNVVVITPNPLRDEKLTNLTEIDISKIYNLLWKYDDEDVEELRYHLTLPIGLSTLVTRNAKMTKLFNNIHKMVFDLPNVQDFLRKSMDFDVVITESLYPTLTAFGPKYNAPLIGLTSSGAPIPGLDTVGNPTHPINSPYHNFPVGRDMSIKEIILFTIWAVYLKINYYFIVLPREDALARKHLGNHLPYLGNVEFNLIIRNKNPIFPKSMPILEPVVVELGYMQKNVSELDDKMKEFLDQSKNGVVYFSLGSNIKPSVLPPKYIKEIVGAFRKLSYDVIFKWDQDILEDMPKNVLISKWVPQEAVLRHNKTVVFVTQGGVQSCEEAIINEVPIIGIPFFPDQISIVDTMVEYGVGKRMNYAELTAYQLSVLIEVVIENPIYKENIINLKKLYTDQQTDGLDERIWWIEYVIIRHKGASHLKNSGKDVYWYQKLLSDMFSFGSFLFVGVCMVSAYYLLYVMAKHNLLLIFYLLRKFREGVRYARTLP

SEQ ID NO: 7085 - protein, 543 aa, Megachile rotundata
MKLCSIVLFCAILSICHGYRILCLFPFNGKSHFIMFEQLMKALARKGHQVDAVSPFPLKKPYPNYRDALTVPVSRQFMNNMTFAEVNEMINSSPAYAVGSILSDEVCRYLGNEQMQQFLKNARKNPTYDVVIMEIFGAHCFAAVGHVLNVPIIGVSSSALYPWAYEYIANPENLAFAPNILLSYMENMNFFQRLYNFLHHKYNVHVFRQASSIQTEMIRKYVSPDLPDIRELEKKLAMILVNSHSSWNGIRPSTPALIEVGGLHVQEEGVELPPSLEKWMNESKDGFIYFSFGSMVKIESFPAKYLKIFYSSLGKIAPVRVLMKIAKSEELPPGLPKNVHTLSWIPQVKVLKHPNIKAFITHGGLMGTQEAIHYGVPMIGIPLFADQFINIDVGTVKNITIGLNLDTLTEERMDEALNAVLNDPKYRNAAKKLSERFLDRPLNASETAVYWVEYIAKHGADALRSPAVDLAWWQRELLDVYAFLLVALLISLYALTVVVRFVFQLVNANDSAAHKKKDEYNATYIVINGSVHSKNISKQSGNR

SEQ ID NO: 7086 - protein, 1051 aa, Zootermopsis nevadensis
MFSCTVTDHPKVRVFLGHGGLLGTIEAVHVGVAMIGIPMYGDQGTNMKMVEAAGMAVILQYKDITKDSVLQALRTILDNSSYTENAKRTSRVFRDRPMSPMDTAIYWTEYVIRHHGAPHMRTAGADLPLHFMMSEVLMKGLAARGHEVTVISHFPQKTQVANFTDISLIGSMPSFVSTVPLDDIATGWVYTTVKIVSELGVTGCEKTLSHPPVQKLMNSKEKFDLVITELFNTDCYVGFAYKFKVPFISIVTTPLLPWGYERFANPDNPAYIGNIFLGHSDRMSFLERLVNTVYMKILQWEYHYWFDMPSQMIARKYFGETLPPLADIVRNTSLVLVNRHFTLNQPVPNVPAVIEVGGLHVEVPKKLPEDIDKYLNESEHGAIFFSLGSTVRADTFSQQKIDAFLQAFSVLPQRVLWKWEGEALPEHPKNIKIAKWLPQADVLGHPNVKVFITHGGLMGTMEAVFNGVPMVAIPLFGDQFHNVRNYEEEGVAIKLDYSTITKEKVLRALKEVLNNPSYKQNAVTLSRAFRDRPMSPLNTAIFWTEYVIRHGGASHMRSAALYLTWYSYKILCLFPHTAKSHFFMAEALMKGLAAKGHQVTMISHFPQKTPIPNYRDISLVGSMPEYVNQVPLDTVATGHVYTTISFLAHIGYDNCKNTMEFPAMKKFVAANEKFDLIVTELFNTDCLLGYVYRQHTPFIALSSSVMMPWAYARFGNPDNPSYMGNHFLYHGNRMTFPERVINVLYQEGLKLVYKFVFDRPANELAKKYFGESLPPLSEIAKNTSLLLVNSHFSLNQPRPLLPNIVEVGGIHLQPPEHKLSKDLKEFIDGAKHGVVIFSLGSSVKADTFPPDKRDAFVQAFSELPQRVLWKWEGDTLPGQPKNVKIVKWLPQMDVLGHPNVRLFVTHGGLMGTTEAAYSGVPMVGIPLFGDQFHNVRSYVLQGIAVTLDYHTISKSTVLSSLKEVLENPSYKENALRIQKALNDRPLSPLDTAIFWTEYAVRHGGAPHLRSAAIELAWYQYLLLDVIAVLFLAVAVVMAVFYFIVKKLFSLC

SEQ ID NO: 7087 - protein, 542 aa, Neodiprion lecontei
MKSCSAKLLCLFVIVTGCVVSSCECDEIRERFNILGVFGHLGKSHFDVFLPILEELAHRGHNVTVLSFFPRKDRIPNYRDISLGDSTAIFLNVIDLTKLDHSIFYIVSELKMLHNMAEIACYSALRTTAVKEFLKSDEKFDLILTESFNTDCFLGFVHKFKAPFIGLSSHAIIPWVNNRLNNPDNPSYIPGLFHSVSPSMTFFERVMNTFWIVAEQIAYDLMFTRPMQSLVEETFGPGVPPLQDIANNMTALMVNTHFSLHGARPLSPSVVEIGGVHIRGAKPLPKDLQDFLDSAEHGVLYFSWGSMVRASSMPNETLATIVEALGRLKQKVLWKWENDDLPNKPKNLMTRQWLPQFDVLSHPNVKGFLAHAGLLGLSEAIYVGVPIVAVPMFGDQHGNAKAAEARGAAIILQYEDITVDTLTGALNEILNNPSYRRNARAVSEAYRDRPASALETAVWWAEYVARGKGRPFLRSASANLSWYQYHLLDVIGFLSLAGLAVLFVAVFAVKRLLKALNLPVKKVGITSEANDLTKNETNKKRN

SEQ ID NO: 7088 - protein, 529 aa, Caenorhabditis elegans
MRYLLLLAFFPVAFGFNYLIISPVFGYSHMKFMGRIADILADAGHNVTLFQPIIYDYYAHKKIVKNPNIEVINYEVDEEEKAAASEASVFKFFWKAKGSKNPISSAKITSEKLYKEFEHICRKMLLDKELHRWILSKNFDSHISEAFDFCGLYLGDFLKLKSPIPLYSGVRCGAASYAVGEPIPLNYLPTEGSNYGKKSSAIDRLSDMLGLTGYHFQFGILFDKQYDQAYRLTGGNVRTWQEILQSSTFFLTNSNPYLSFSTPTISKVIQIGGFTIESFKTTTLDEEFNKILSLRNNTILVSFGTVIQSSDMPDDFKTGLIEAFRRMPDATFIWKYEEDDKTLKNKLSENVVLSKWIPQPALLADSRLDLFVTHGGLGSTMEVGYAGVSSIMVPVFSDQGVNAEMLARHGGAIVYDKFDLVDSKKLMETIQMILNNSDYRKNSKRLSDILHNQPMDPKQVLLNHCEFAARFAQVDNLEPYANKYNFIEFYCLDSLALVVCTISVVALVMFKILSFVVNSVIEKLKLKKE

SEQ ID NO: 7089 - protein, 309 aa, Tupaia chinensis
MVYTPYAQLASEFLQRDVTVQDLLSSASVWLIRNDFVLNFPKPIMPNMVFIGGINCMSKAPLSQEFEGYINASGEHGIVVFSLGSMVSEIPEKKAMEIAEALGKIPQTVLWRYTGSRPSNLAKNTILVKWLPQNDLLAHPKTRAFITHSGSHGIYEGICNGVPMVMLPLFGDQMDNAKRMETKGAGVTLNVLEMTSEDLANALKTVIFDKSYKENIMRLSSLHKDRPIEPLDLAVFWVEFVMRHKGAPHLRPAAHDLTWYQYHSLDVMGFLLAIALTVAFVTFKICACGFRKCFGKKGRAKKSHKSKAH

SEQ ID NO: 7090 - protein, 1049 aa, Ostrinia furnacalis
MARLISLVILIACAFVSDEGARILAVFPTPSISHQVVFRTLTLELVNRGHEVIVLTTDPIFKDGGSPKNLLEIDAHDVSYDSWSVFTSSNLTTGNKKDTRAQSRLILTLLMSLFEKQMQLDDMKQLLMDKSQKFDLLILEAYFWPLLGLTHVFKAPVIQVSSFGSTDDNLKTFGAVIHPFLYPTCGIQRVNNLTFWEKVSNIYNAYITERNLAKLYEISNEMLKRVFGESVPSIDDLRNNVDLLLLNIHPIWERNRPVPPNVIFMGGVHQKPEKELTQDLKKYLDASENGVIYISFGTNVDPASLPPEKIQSMIAAVSKSPYDVLWKWNHDELPGRTSNIKISKWFPQSDLLRHPKVKLFITQGGLQSTDEAITAGVPLIGIPMFGDQWFNIEQYEYHNIGIKIDMDTISEEKLRNAIETIMKDKSYYDNIARLRTLMYDQPQSPLERAMWWTEHVIRHSGARHLRTAAANMSWQQYLEIELVIYVILGFITVILSIIFACYLLYRTVIRLSKSTKLKRTYQVCCVISMTSFRHVFTIACFIAHNEASRILAVFPTPSISHQVVFRPLVEELVKRGHEVVVVTTDPVYKNGGAPTNLTEIDVHDLSYGIWRTEFLQASVASGSKEELSGQVSMSLKTMMKVFEEQMLTTEFQKLLKYKSQKFDLLLLEAFFTPLLALSHVFKAPVIQVSSLGNTEDNLHMVGAVSHPILYPTAMQQTLNHISLFEKLSEIYHYYDTLAILAAVEKFYDERIAAVFGTETPPLTELKNNVDMLFVNIHPIWENNRPVPPNVIYMGGLHQKPEKELPQDLKNYLDSSKNGVIYISFGTNVDPALLPPEKIQTMINVLSKLPYDILWKWNQDELPGRTPNIRISKWLPQSDLLRHPKVKLFITQGGLQSTDEAITAGVPLIGMPMLGDQWFNVEQYVHYNIGIRVDMDTVSEDKLSSAIQTILKDNKSYRQNIVHLRSIMRDQPQSPLERAVWWTEHVLRHSGARHLRAAAANLPLYQYLELELVTYVVLALLTVVTLTLVTLYSLYSLVSKKFVRQKVKSS

SEQ ID NO: 7091 - protein, 2225 aa, Blattella germanica
MYHNKKLHIRDSFSINHNCRPSNLTCYLRNKNQLENLIAIFKISVPNLVNIRSSHLGTKSIVDQCYLIEALQLEHNHRKMFYNEDIFQDTISKLSMFVLSDFRYPSYQCLFCQISDIQVDSLFYSMTEHIQGAKILAIFNLNVKSHFFMFETLLKRLAERGHQVYVAGHFPLNKPIRNYVDISVEGSVPALFNNFTIEYGRSLGYWNLWHFIFIHTVEMCETMLQQPQMQEIISGEHKFDLVITEPFGPDCFAGLAHKYNAPLINILSSVALPWVNDRIGNPDNPSYIPNYFLPYSDKMNFFQRVINLMFTEGLKLGEYYFGELAMDELGRKYYGADLPPLSTLKKRTSMLFLNSHFSLNIPRPVVPSFIEVGGLHIRPGGKLPKDIETFMNEAKRGVIYFSLGSLYFISGHPNIELFITHGGLMGVQEGVYAGVPMIGIPLFADQQHNIENCVSKGMAEMVDYDFLSEETMMNALSTVLNNTSYKTNAKQLSTLFKDRPQTALETAIFWTEYVIRHKGAPHLKSAAVDLPFHQYLLLDVLAVILLGVCVTALLLFLIIYKIYTQAKEIKIKLRISTIQGRFSTTEALIKFIGQFGRIAIFKIDRFMKHFHIILTGLLITMSCVDHMDSYKILGLVHLNSRSHFVMFEALFKGLAAKGHEVYVISHFPQKEQIPNYKDISLAGSVPLSVNNFTMDFVKDFGYFNLLDYLWHNIVDMCDKSLGHPSFQKLLSSNDKFDLIITEITVFLFLTQKFNAPAISMTTSVTFPWGNDRFANPENPSYIPNYFVGFCRMNFVERLICTVSLVYAKLGHYYIGETNMEKVFQKHFGNTVPPLSEQKKNTSLILELETFINEAENGVIYFSLGSLVRGESLPKDKLQIFIDVFKHLPQRVVWKIDTIQGLPKNIWTSKWMPQLEILNHSNVRAFISHGGLMGTMEAVHIGVPLVGIPLFADQTLNVKNCVSKGFAIMLDYDLLSKEALSKALNDVLHDPRMKAKNSFHLHQNKHFNQNCYFHILELPMQWLGIILTGVIILSSVDRTTCYKILGLVHLNSMSHFVMQEALYKGLAAKGHEVYVVSHFPQKESIPNYTDISLKGSLPDLVNNFTIESLRNFGIINLCKYIWYTLADMCDTALGHPSFQKLLYSNITFDLIVTEIVGPDCFLFLSRIFKAPVISVTTSVAFPWGNDRFGNPDNPSYIPNYFVPFTHQMSFKERVINTVILATAKLGNYYIGEANMEKVLKKHFGNTFPPLSEQKKDTSLVLVNSHFSLNFPRPSVPAFIEVGGLHIQPGGKLPQDLQTFIENAEHGVVYFCFGSLAQAESLPKEKLQVFIDVFKELPQRVIWKIDNVRDLPSNIWTSKWMPQLEILKCIIFCIVLEHPNVRAFITHGGLMGTQEAVHAGVPMIGIPLFADQELNIRNFVSKGIAILIEYDSLSKERLSEALNAVIHDPSHFSISTPRPMVPTSIEVGGLHLGTPKKLPKDLERYINESTHGVIYFSLGSLVRSETFSSEEIKAFADAFAELPQRVIWKTDTIPGLPKNVLAAKWLPQFDILSHPNVRVFITHGGLMGTQEAVYNGVPMVGIPFYADQHHNIENYESKGIAVKLDYNHISKESVLSVLKTILNNPRYHENAKRISNLFKDRPQTPLETAIYWTEYVIRQRGAPHMRTAAADLPWYQYFLIDVILTLVVAFFLPLLSLYLICKRTMKFLGFTIATSLAFIFLAGTTEAARILALFQFNGKSHFVMFEALLKGLAAKGHDVVVVSHFPQKNPVQNYTDISVEEALTEAVNSFTLDFALNFRYYNLLYFFWQENLEFCEAVFEHPNIKRLIKSEEKFDLVITELFGVDCFTGFAHKFQAPLISMTSSTLLPWANDRMGNPDNPSYIPNYFLSFTDRMTFPERMLNTIFSIGLKWGSYYFSELPTERLARRYLGEDLPPLNEIAKNTSLIFVNSHFSLSTPRPLVPGVVEVGGLHIRTPGKLPQKLQKFIDDAKDGVIFFSLGSLVKGETLPEDKRQAFLSVFSKLPQRIVWKADFMPGLPDNVMTGTWLPQFEILNHPNIRLFITHGGLMGTQEAIYIGVPMIGIPLFSDQKMNIENYVRKGIALKLDFYSITEETLLSSLNTILNDPSYEKNAKRMAALFRDRPQSALETAVFWTEYVIRHQGAFHLRTAAVDMPWYQYLLLDVIATLLLIIILAFVMIYYILKKITSLIFGRKPSSSMNGHLQKSKKH

SEQ ID NO: 7092 - protein, 519 aa, Helicoverpa armigera
MATLNYLSLCLTLQLIFYTDAARILAVYPVPSISHQVTFRPITLELVKRGHEVVVVTADPMFKKGEAPQNLTEIDVHDLSYNVWEAFMNSERGKKEDLIPQMRVGVEVLVELFDKQMQVEEVKELRKGKQHFDLLLTEAVVKEALAFSHIYKVPVIQVSSFGAMFENYKVLGAPVHPFLYPESMAMRIYNLTMYEKLNELYVKYTVEYLFASIEERQNVLMKKYFGDDLPSMQELQNNVDMLFLNVNPIWEGSRPVPPSVIHLGGLPQKPNKELPKDLKSYLDSSKHGVIYISFGTNVKPSLLPAEKIQMLVNAFSKMPYDVLWKWDKDVLPGKSDNIRISKWLPQSDLLKHPKLKLFVTQGGLQSTDEAITAGVPLVGVPMLGDQWYNTEKYEHHGIGVKLELGTLTEELFANAVNKVIGDESYRKNINKLRELMNDQPMKPLERGIWWIEHVLRHKGAKHLRSPAANISWSEYLELELVFTVLAVALSALLILAFALYSLYKFVSNNFIIKAKLKST

SEQ ID NO: 7093 - protein, 243 aa, Trichoplax adhaerens
YPRPVTPATKVVGPILPKPAKALPIHLQEFVSANPNGTIVMSFGSVVTGLKYITDVQMLFKSLGRLPYNVICKYSEKHKYSIPKNVMTFNWLPQNDLLGHPNIKGFVTHCGMNSILEAAYHGIPMVGIPIFGDQIVNAQKILYRNIGVVLDINEINSDDLYFGIMNATTDQWILGNASIVSKLIKNRPNGRTPVEEAADWIEFALNSKGGHYLRSEEYNLPWYQLYLFDIFAILCMMIIITII

SEQ ID NO: 7094 - protein, 456 aa, Copidosoma floridanum
MMFNALMVGLAKRNHQVDVITHFPAKNPPPNFKLLIKLNGTFDKVSINSVVDRDLTAHIADLRGNKMCELLGIEEIQKLIKNPPHDPPYDLLVTEVFGANCFLGLGYVLNVPVVAVTTSVEYPWVADFNGNHDNLAVVPSYYTTNFDKFKFSHRLFNFLMRKYLSPDIPNIREVEKSIALLIVNRSPLIDGPKPVTPSMIEVSGLHLEENEIPPITPELQKWLNESEDGVVCFSFGSMVLIETLPLNSIKALFESFKKISPVRILMKIVDESKLPPGLPENVKTLPLIPQQAVLAHKNVRIFLTHGGLMGCQEALYFGVPMIGVPLFSDQPQNLDKFVAMNMAIKINYNNLTTTSLDEALNAVLYDPKYRENAKYYAKVFKDRPMKSMDMATFWIEYVIRNGNIMKSPALELSWWQLTLLDVYGFLLTCLAIAFTVLYRVTRRLMKKVPVLLAQWS

SEQ ID NO: 7095 - protein, 390 aa, Trichoplax adhaerens
SFLDAILCDPIFYACQVVAEYADIPIQIDVSPLGIGEPFTSLHHIPSPPAYIPQYSLASKMNLIERTANVIINLILLPALNHLIFKPIYAVTNASKLGLKTIPRYEVRRASFLIANGDFAIDYPQPLTPSSKLVGPILAKPAQSLPTDLERFITSNPKGAIVVSFGTVVTALKHIVDMQIFFYAFRRLPYNVIWKYDEELPDEVASRNLKLVQWLPQNDLLGHPQVKAFVTHCGYNGILEAGYHGVPMVGIPIAGDQIAHANKITARTIGVILNIRTLASDDLYNAVMKVTSDQDILGNASKVSKIIKNRPNGRKPVEEAGDWVEYALNCNGGDYLRTEEYNLKWYEFYLLDVFAVMIAICYLIVKVLRLLWNGMVMLCSDNKKAKVKAS

SEQ ID NO: 7096 - protein, 520 aa, Vanessa tameamea
MRPPLIYYVVFFTLSSYAVHGARILGLFPHTGKSHQMVFEPLLRKLAERGHHVTVASFFPLKNPPANYTDVSFEGIAGVGIETFDLNWYENPSLVQRIPIVGSVVKQINEFNPLAGMAIHVCSKVVDWPPLKEALSKEYDLVLLENFNSDCMLGLLHVYGIKAPVVALLSCTLMPWSAYRIGITDNPSYIPIVSTAFNSQMTLLERMENTFLKIYYKLWFNHKIQLKEQAIIEKQFGRKIPELSELSKNVTLMLTNTHHALNGPRPLLPGLVEVGGMHLDPTRKVIPEHIEKFLNDSENGVVLFSFGSLIKTASMPKYKEEIFINALSKLKQRVIWKYEDSAENGTLVGNILKVRWLPQYELLRHNKVVAFIAHGGLLGMTEAVSAGKPMVVIPFFGDQPGNGASAMAAGFAKVVSYMDLTEQELSEALQSVLSAERRLNARRVSNMWHDRESAPLDTAVFWTERVIRWGHTGKLHSSAKNMPFYEYALLDVAAAYTLILIVIITVIYYKNPAISSCIRF

SEQ ID NO: 7097 - protein, 535 aa, Caenorhabditis remanei
MNVKFLISVSLLVLFNSTDASKILIFNPIFGFSHVKFISKLADIIAEHGHNVTLFQPYHNAMKNVEGLVKNKNIEILNYYPTHYDELLKKETQTFSIFWDSQLIGNPVLGAFMLPFVLGGEFKKTSMEVLGDKNLINDLKERRFDVVMAETFELTGIYLAHLLDVPCIPMMSTVRYPIFNGLFGQPSFLGTVPQQGSLGAPEAGFLDRLNDIYRFIFTGIAQERLNKYQNDFIQEAIGRPVPNWKDLVSQSPIFITNSNPYLDYAVPTTAAIVHVGGITMNLDKMKNTGKLPEEYENILKERESTILLSFGSVIRSYEMPENFKAGIIQMFESLPDVTFIWKYEKDDVEFQKRLPKNVHLRKWVPQPALLADERVKVFVTHGGLGSIMEVAYSGKPAIVVPIFGDQSHNAMMLARHGGAVAYDKFDLQYGQKLAGVITELISNPKYKENAKMLLEVLVNQPIDPKINFLNHLDFAIKFPALRSQVPAIQHVGWIAHYYLDALVFLFILAIIFLYLLFKLLRRLLNRFIGKKPKNE

SEQ ID NO: 7098 - protein, 474 aa, Bombyx mori
KAGHELTYITPYPKTPAPNLRVIQIAEHAFEEKMNSMFTIEKLIDNTFALKEMFSILKSFIDTANDTVSNTEVQQLMLDPQTHFDVVIAEWMLTEIFSGFSTIFNCPLIWSSSMEPHSPILQLIDEMVHPAYSSNMLGLFEPPYNFFQRAINTLIEIGLKVAKWFSALIEEQIYKEAFAAAFKAKDLVQPSLEELRYSAALVLGNSHVSSGAPLKLPQNYKAIGGYHIDEQSKPLPKEFKNILDNSKHGVIYFSLGSIVPSKSMPAEIKNGLFEMFRNLKYTVIWKFEDEFQNVPDNVHIVKWAPQQSILAHPNCILFITHGGLLSTTETLHHGVPIIGMPIFGDQAMNVKKAVHKGIGLEVKFDSDTPKNLKAAINEVLSNQKYRDRVKELSLIYHDRPVSPGAELVHWVEHVVQTKGALHLRSPALHVPLYQKLLLDIIFVSLLLFLGFVFFVKFMLTRYLKKKTDIRKKTL

SEQ ID NO: 7099 - protein, 421 aa, Spodoptera litura
MSTAVTLFLLSVSIAYNDAARILAMFPVPSISHQVVFRPYTQELARRGHQVTVITPDPAFPKGEVPANLTEIDVHDFSYEMWKSFYKVTSTGDNDLILQMTLAFSIIVDIVEMQLKLDVVQKILKEEKFDLLLLEACAKPALVLSHVYKVPVIQVSSFGPMNFNVETIGSAWHPLLYPGILTKRSLNLSKWEKLEELWNFYRIEKILKGVENSENEMAERLFGPDVPSMSELKNNVDMLFLNAHPIWDGNRPVPPSVIYMGGLHQKPQKELPADLKRYLDSSKNGVVYISFGTNVQPSLLPQDRVQMMAKVFSQLPYDVLWKWDKDELPGRSKNIKISKWLPQSDLLRHPKIKLFITQGGLQSTDEAITAGVPLIGFPMLGDQWYNVEKYVHHGIGLQLDLLSTNEVEFKNAISTVINDER

SEQ ID NO: 7100 - protein, 1066 aa, Spodoptera litura
MEKIICLLFCTVVTLCSCEAYKILAVLPIPSPSHGILGDNLVRHLLDAGHEVTYVTPFTSKQKNHTNLHIVDVDANHVIYEDGEDQLDFQQILDHRSTVVDSPFLFWVLSNVADMTLSNPNVQKLLRDPQQKFDVILVEYIFTDVFSALSAIYQCPFIWFSTIGPHWMVLNLVHGPLNPAYNTDFLQARVPPFPFLGRVEELWTQVKGLYRHKFDFYYEEERIYQNRIVPILQELGKPVLNLNTMKYNASLLFGNSQVALGDAVPLPPNYKHIGGFHVDEVAKALPENLQKIMDEAEYGVIYFSMGSNLKSKTMPNELKKGLLKVFGGLKQTVLWKFEENLSDRPKNVHILQWAPQQSILAHPNAVLFVTHGGLLSLTEAVYFGVPVIVIPVFSDQFLNANQAQHKGIGEQIKLSYNLDKDLKVTLNKVLGDLSKYTARAKKVSAAYRDNPVKPGKEFNFWVEHVVRTRGAPHLRSVALQVPLYQQAYLDLFAVLLAAAVVIVLVVKKIVCFLTSKSKKLKRNIVIRQRIFQKDLKLIETFSKMEKLRYLLFFVVLSLCTCDAYKILVVFSNPNPSHGILGDNMVKHLLSAGHEVTYITPYIETLKNKTKAHLVDVGNTHKILEVAKDIMDLKQILEGTVESPDFKLMFELVSTIGDMTLSNANVQKLLRDPKQKFDVIIAEFMFNELFSTFSAVYQCPYIWFSTIEPNWIALHLVSDPMNPAYNSDYLHGRIPPFSFKERVEELWTQIKGLYHYNFDFYNAEEAIYQKHVVPVLKEQGKPVPDYNMLKYNASLMLGNTNVAIGNAMPLPPSYKHIGGYHIDEEVKPLPEDLKKIMDNANNGVIYFSMGSNLKSKELPDELKNGLLEVLGGLQQTVLWKFEENLPNKPKNVHIVQWAPQQSILAHHNLKLFVTHGGLLSLTEAVHFGVPLIVIPVFADQFLNANQARNKGFAERVDLSYNLDKNLKVALDKVLGDFSKYSARAKEVSAAYHDNPMKPGVALNFWVEHVVRTRGAPHLRSVALQVPLYQQAYLDLLAVILAATVVILLVVRKIISLLTVKNTKLKKN

SEQ ID NO: 7101 - protein, 520 aa, Helicoverpa armigera
MSLPVLYLLVTCMLISSNEAAKILAVFPVPSISHQVVFRPLTQELAKRGHEVTVITPDPVFKKGEVPSNLTELDVHDISYNIWNENFIKAASKGNKEDMYTQLEIILDTLVEVFEAQLKTDEVKTLIDDKSKKFDLLLVEACVRPALAFSYVYKNVPVILVSSLGAAPLNYELIGAADHPILYPSVLRQRLHNLTTWEKFTELYSHYRIMKIYENNAVLTNKVFRDRFGPDIPTVDELGNNVDLLLLNVHQIFEGIRPVPPSVVYMGGLHQKPIKELPKDLKTYLDSSKNGVIYISFGTNVAPSMLPPERIQILVKVFSQLPYDVLWKWDKDELPGRSKNIRISKWLPQSDLLRHPKVKLFITQGGLQSTDEAITAGVPLIGVPMLADQWFNVEKYVYLKIGLQLDLETLTEEQFRNAINTIVGDDSYKRNIEKLRSVMEDQPMKPLERAVWWTEHVLRHGGARHLRSPAANMSWAEYLELELVLIVLAGLLAILTAIFGAIYALCRCFTKEVSVKHKSH

SEQ ID NO: 7102 - protein, 537 aa, Papilio polytes
MRLPLRFLHSSVSVLVIMLVKVLHILLLNFIVSVKSANILAYYPCPSISHQVVFRPITLELIKRGHTVTVLTTDPIYPRGKTPANLTEIDMHDVSYNLLRKNLHRIIIGKTNEVITQVHNIKELSIIAIEEQMNITEVKEFISDKKQRIDLILVEAFLETALGISHLFKAPTILVSSFGPFLGNYEIIGAPTNPPYLYRNFFSQKLYNMTIWEKIIDLYTQVRIKYITIASEDEENKALKRIFGPDTPTLNELKNKVEMLFLNINPIWEGNYPVPPAVVHMGGLHQKPPKELPKDLSQLLDNSKNGVIYFSFGTNVRPSLLDPAKIEIFHKVFAELPYNVIWKWDDESLQPRSDNVRIFKWLPQSDLLRHPNVKLFITQGGLQSTDEAITAGVPLVGVPMLGDQWYNVEKYVYHKIGVRLDFEDLTEEKLKQALLDVAENESYRNNIIRLRSLMQDQPQKPLERAIWWLEYVLRHGGAKHLRSPAANISWSEYLELELLSLVLISLVTSLVLITLVLRFTFQKLLQLYQIHYKEKML

SEQ ID NO: 7103 - protein, 524 aa, Stomoxys calcitrans
MKHLVYLCIIVHVIQLSPAIEAKEILGIFPHFGYSHFKVFYPLLRNLAEAGHNVTVITHIQSSNKLDNYEELLLKQMEVVNIVPLSEWRPRTWNGLLNEYVGLHEEGQESCERLYESGYVQEVLRRHQEIKPYDLVITEYFNSDCQLVVPYLMNTPIVALSSCLLMPWYYDRILLPDTPSFIQSEFIGFSTPLNWFERLTNFLQAKVLSLLYRYHTNQKDNDLIYRHLNVTVDVADIARQQTSIIFGNQHYSLTGTRPQPTSFIEIGGIHIQEKVIDEPMPRDIDDFLQTSGKEGVLFISWGSMIRASTISSDKLTAILKVLERSNLKIIWKWETEEVPVKNDKFLFVKWAPQLTLLCHPKVKLFWGHGGLLGTTEAVYCGKPMILTPIYGDQFVNAHAVENRQIGRILSYDNINDSSLEDALQTVRHSSYAKNAQDISNIFRDRPSKPLETATWWVEYLLRHKRAPEVLHSHAVNLNWFILYSLDSICIIVVTLLLIIFVLKYTLKLMMKICRNKNDEKLKKH

SEQ ID NO: 7104 - protein, 334 aa, Leptinotarsa decemlineata
MLNFQGDLSFIDKLKSFLFNIWYRAIYYWYALPMADRVARKYFGEDMPYLGDIERNISLLLLNVNPIMQTVRANVPNVIEVNQMHIREKKPLPKDLQEYLDSSSEGVVYFSLGSNVKSANLTSRMRDVIMGAFSEVPYNILWKFETDDLSGRPDNVLTRKWLPQQDVLGHPNIKAFITQGGAQSIEEAIYNEVPMIGIPFITDQPTNVRRVVDLGMGLGLDYRTMTKGQLKNAIQEVIENKKYKKRVQESKAILVDQPIKGVEKAVWWIEYVIRHKGARILRSPSADMPFAEYFMLDVIGFILLCICLSFYAVEKVFALLRYILYSRRTKLKEN

SEQ ID NO: 7105 - protein, 530 aa, Mesocricetus auratus
MAPAGSPASLPLCVCLLLASGFAQAGRLLVVPMDGSHWFTMQSVVEKLIHRGHEVVVVVPEVSWQLRKSLNFTVKTYSISHTIEDLNREFKFFMDAQWKPQHEGLVPILGSPAQRFFELLFSHCRDLFNDKKLVEYLKQSSFDAVFLDPFDVCGLTVAKYLSLPSVVFGRTMFCHYLEEGAQCPSPPSYVPRAHLKLIGTMTFTERVWNHLAYMMERAFCPTLFKVATEIASEVLQTPVTMDDLVSQVSMWLLRTDFMLEVPRPMMPNIVFVGGINCHQGKPISKEFEAYVNASGEHGIVIFSLGSMVSEIPEKKAMEIAEALGRIPQTVLWRYTGPKPSNLAKNTILVKWLPQNDLLGHPKTRAFITHSGSHGIYEGICNGVPMVMMPLFGDQMDNAKRMETRGAGVSLNVLEMTVDDLENALKKVINDKSYKENIMRLSRLHKDRPIEPLDLAVFWVEYVMRHKGAPHLRPAAHDLTWYQYHSLDVIGFLLAIVLTVVFIVFKCCAYGFRKCFGKKGRVKKSHKSKTH

SEQ ID NO: 7106 - protein, 516 aa, Papilio xuthus
MKLLVLILLFNFKFSNIYGARILAVFPIPSISHQIVFRPIIKELLKRGHELVVITPDPAFPKGKAPVNLTEVDVHDLSYSSWERFIQRSEDTGSIWADKVVFILSVIEQVFEEQMISEQVINLLKQNEKFDLILVEACVRMTLGLSHVFKAPMIQISSFGSPFKNSESIGTPFHPFLYPSVFRHRINDLNIWEKLTELYNEFVFHNRLKSNEIHENKIMKRLFGEDTPTLQELFKKVEMLLLNVHAIWENNRPVSPNVIYLGGLHQNDKKDLPKDLQKYLDSSVNGVIYVSFGTNVRPSLLPLEKIKILTEVFSELPYDVIFKWDKDELPGQTRNIRIFKWVPQADLLRHRNIKLFITQGGLQSTDEAITAGVPLLGIPIFADQWYNIEKYEKFKIGRGLNMDTLNKETLAAAITSLIEDESYRRNIERLRTIMNDQPMRPLDRAVWWIEHVLRFGGAAHLKSAGAHVTWSEYFELDILIILILLTFISLILSSLFCIAAWKFLSKYIWNVKLKTF

SEQ ID NO: 7107 - protein, 540 aa, Drosophila persimilis
MTTWWRISRSVLIALWLIVITGTPPPAFGGNVLAVYPHFGFSHFKVVMPILNELARRGHQLTVISYVNHPQAAEWPNYEQLLISQAGEDQSSTTINLVPLSEHTPTRSLLTLFWEYIALHSEGQESCERLYASGHVETVLKRHQTKPYDLLLTEYFNSDCQLALAKLMDLPIIGLSTCALMPYYYDRIDLPDTPSFIQSEFVGFAGVLSWDERLVNFIQAKMLKLLYKYHSIRADNALVRKHFGIDVDVDEVARTQTAFIFGNQHYSLMGSRPQSRQFIEVGGVHLTSQAEQELPPNIAQFLDQSEVPIIFISWGSMVRISSIDADKLAAIVEALERQPLRVIWKWEADEKPKMDSTKFLFVKWAPQLALLCHPKVELFWAHGGLLGTTESVHCGKPMLVTPIYGDQFLNAFSVQNRGMGLKLDYEEIRVTSVTQALNELNNTSYATRSLGISKIFNQRENSPLESAIWCVEHVIQHGLLAAEMLQSPGIELNWFVYHSLDSVCLIFVVLMVLAYSLCHFSGGSSSKSFNGNRRRKSKRS

SEQ ID NO: 7108 - protein, 423 aa, Papilio polytes
MKIVGAIVLFTLHFSNIYGARILAVFPVPSISHQIVFRPIIQELLKRGHELVVITPDPAYTENKTPVNLTEIDVHDLSYSTWERFIQRSEHPKSCWVDKVLFIISVVEQVFERQMNSQVVRENVLNGNEKFDLILVEASARMTLGLAHVFKAPVIQISSFGSVVKNYEALGTPFHPFLYPSVFRYRIYDLNIWEKFAELYKEIKFHYSLQNSEIRENEVMKQLFGADTPTLHELYPKVELLLLNVHAIWENNRPVPPNVIFLGGLHQNDKKELPKDLQTYLNSSVNGVIYVSFGTNVRPSLLPLNKMKILTEVFSELPYDIIFKWDKNELPGRSGNIKISKWLPQADLLRHPKIKLFITQGGLQSTDEAITAGVPLLGIPMLVDQWYNVEKYEKFKIGRGLDMDTLSKETLAATIKRLEHIVS

SEQ ID NO: 7109 - protein, 512 aa, Neodiprion lecontei
MNLIATCFVLGLAGGGEGARILGLFPIPGKSHLSVTSPLMHALAKKGHDVTVFVPFHTGFNASNYREITYDSIPLDKHGNIMDYLNMNIFLAHIFLYYMGTLTTEMALNTTGAQALIKSEEKFDIIVMEQFFNEAFLAYVHKFKCPFVLISAFGPTATINGIFGNSAPYSYVPSEFLPFGDRMTFFERLENTIANLYFDGSRKYYYMPQQQALANKYLSDTGKEVPSLEEIESQADLILLNSHHIFSTPRPYMENMKNVAGMHLKPSKPLPLDLQQYMNSSKNGVILFSLGSAMQSILMPDDKIKALKGAFERLPYDVLWKWENDTMENKPKNVRIGKWLPQSDILTHPNLKLFITHGGISSLMETVYHEVPIVGIPLFGDQRRNIKIAESKGYADYVDILTLTENQVYNAVMNVATNPKYRDNVKKVSAYWKGEMNHPLDVAVHWVEYVLKNGGAKLLKATVTEQNFIQYFLLDVGFAILLLLILTCILIRKTFRLLCRKSRPKMTSKKNN

SEQ ID NO: 7110 - protein, 521 aa, Copidosoma floridanum
MITRSLLTLLLYGLSLCTGARILAIFPFELKSHRGVLEPIIEELAVKGHHVDVISTFKLSKNLPNYTNILTLPTSKEPPKILYSDNYTPYDDYVWLVKVNNRVCNLLGHPVISELIKNPPKNPPYDLLIVHILSGYQCMSAIGVALDIPVVGVMTTLPYPQMEHYLHNPLHLAGMSRHCRSFEENFGFWGRLYNVVMTNYYITHHYKHADAQDHYIKKYLGPNMPSYREIEKSYSLIFSNSHYLYHGVKPKVPGLIEIGGINVMNDTSPMDPKLKKVLDESKDGFIYFSFGSVVVVESLPHEIVDKFYSTIRKVAPIRVILKSSNPETLPKNLPKNVFTFPWLPQQKVLQHPNIKAFVAHGGALGTLEAIYYRVPMICVPFFAEQYVNCDISKHRNISLKLDIKTAVQKDYDYVFSQILTNPFYKQSINKFSALYWDRPQSPREAVTYWVEFVLRHGKDVLRTQGLALNWWQLELLDVYVFLITCALTTVLIVCLIARKILRLFLQVRSMSSIVKSSKKLM

SEQ ID NO: 7111 - protein, 533 aa, Equus przewalskii
MAAGSQGPRLLVLGLLLCVLGPAVLQAGKVLLVPIDGSHWLSLVGVLQQLQQRGHDIVVLAPDASVYIKEGAFYTLKRYPVPFRREDFEATFISLGHSVFENDPFLRRVVKTYKKVKEDSALLLSSCSHLLHNNEVMTSLVESSFDLVLTDPFLPCGPIVAQYLAVPVVFFLNALPCSLDFQGTQCPNPPSYVPRSLSSNSDHMTFLQRVKNMLIALVESSLCSVVYSPYAPLASEILQKDVTVQDLMSSASVWLLRGDFVKDYPKPIMPNMVFIGGINCVSKKPLSKEFEAYVNASGEHGIVVFSLGSMVSEIPEKKAMEIADALGKIPQTVLWRYTGTPPPNLSKNTILVKWLPQNDLLGHPKTRAFITHSGSHGVYEGICNGVPMVMMPLFGDQMDNAKRMETRGAGVSLNVLEMTSDDLANALKTVINDKSYKENIMRLSSLHKDRPVEPLDLAVFWVEFVMRHKGAPHLRPAAHDLTWYQYHSLDVIGFLLAVVLGVAFIVYKSCAFGFRKFFGKKGRVKKSHKSKTQ

SEQ ID NO: 7112 - protein, 426 aa, Pieris rapae
MYRIILFSFFITAQNSNGARILGVFPAASISHQVVFRPLTQELARIGHEVTVITTDPAFNDDNRPANLTEIDVHDVSYNVWLQKMKEKPIKFGDKSDVFKLVEEMAVFFGIIIEEQLKTDGVQKLINNKSKKFDLIIIEASARPAIMFSHLYKAPVIVISSFGMAFGGEDLFGAPSHPILYPNMMHQRLYNLTFWEKFYEFYKHYWILHMWESTENKEFNLLKKYFGGDDVPSYKELYKNVDMMFLNIHPMWSHNQPLPPNVISIWGIHKNPQKSLPQDLKTYLDSSKNGVIYISFGSNARSSMLPPEKIKILINVFSKLPYNVLWKWETGVLPGKSENIKIAKWLPQSDLLRHPNIKLFITQGGLQSMDEAMNAGVPLIGIPMFGDQWYNVESFEYHKIGVQIELDTITEEQLTKAIETVINDKR

SEQ ID NO: 7113 - protein, 495 aa, Caenorhabditis nigoni
MADIIADHGHNVTLFQPFHNAMKNTEGLVKNKNIEIINYYPDHYEELEKLETETFPGFWDSHLMNNPILQAFMMPRSLVGEFRKTAVQLLKDQKMLDELKSKNFDVVISETFEITGFYIAHLFDLPCIPIMSSVRFPIFNELFGQPSSLGYLPAIGSNMAPEAGLFDRLNDIFRNFLFMNCMERMSDLQQTFIEEAIGRPVPHWRDLIKQSPIYMTNSNPYLDFAVPTTSTIVHVGGITMDLKQMKHVGKLPEEYVPILSERASTVLISFGSVIRSFQMPENFKAGLIKMFESLPDVTFIWKYEKDDVELQNKLPKNVHLKKWVPQPALLADKRVKVFVTHGGLGSTMEVAYSGKPALMIPIFGDQPWNALMLARHGGAIAYDKFDLQDGEKLTRTMKDMVENLKYQEKAQELLEILSNQPIDPKLNLMKHLEFAMQFPNLRSQVPAINQVGTIAHYYLDAIAFIAIFAILFVYVSYRIACKLPIRLVSKKVKSE

SEQ ID NO: 7114 - protein, 522 aa, Bicyclus anynana
MTIKVLSLLCYAIVLTSIESARILAVFPFPSISHQFVFRKLTLGLANRGHEITVMTPDPAFPQGNAPPNFKEIDVKEISYKIWQNLFQANYKVDRTFVSFREIRTSVRLTGAILKKQFETPEMQEIVTNTTRKFDLILVESMMHPAIVLSHILKAPLILVSSFGGIYNNHHIMGAPTHPLLYPSVFHRRLYKLSIWEKIKELYEHFFIDYALYLNEADETAFLRQLFGPDIPTMNELYNNVDMLFLNINPIWADNRPVPPNVVYMGGIHQSPEKELPNDLKTYLDSSKYGVIYLSFGTNVMSGMILNDKIQMIIKVFSNLPYNVLWKWDKDELPGKSNNIKISKWFPQSDLLKHPKVKLFITQAGLQSTDEAITSGVPLIAIPIYGDQWYNAEKYVKHGIGKQLDINKLTEELFKNAVETVITDESYRKNIVRLRQMMHDQPEKPLERAIWWAEYVIRHGGAKELRSPSANLSLVDYYEVKLILLVMSVVLIALITLILAVVFVTKYVKTKIRRTITEKKLN

SEQ ID NO: 7115 - protein, 536 aa, Ceratitis capitata
MKMKEETAILLLAFALFIATAQIATVNGSRILGIFPHFGYSHFKVYYPLLRALAERGHHVTVVTYIAALNETKPANYEELLLKGRETTNMITFADVLPHRTLYDILTEINFVHNEGQKACKRLYESVYVDKIFKRHERKPYDLVITEYFNTDCQLGIPYLLQLPVVGLSSCILMPFHYDRIALPDFPSYVQSEFVGFPEVLKWHERLLNFLQMKLLKHIYRYRTNYYDRRIINKYLNVDFDVDDFAKRSTGLIFVNQHYTLHGNKPLTPQLVEMGGIHIDETAVNATLPAKIEKFLKNAPLAGVLFFSWGSMVRSSSMPTEKVQTIVKVLEQQPFHVIWKWETDEVPTKSKKFLFVKWAPQLSLICHPKVKYFWGHGGLLGTTENIYCGKPLIVTPLYGDQSVNANAVQNRGVGTILLFDDINEKNLRATLMEIRRKSYADHAAALSHMFRHQDKKPLDRAVWWVEHLLQENGKTAHKLLQTKAVKLNWFVYYSLDSVAIILLGLAVILYIVRAFLRLLCGFFCKQGKQSGKVKTK

SEQ ID NO: 7116 - protein, 525 aa, Hemileuca sp.
MNSKTSYSTLFNRIFLFLSFTVVINHHVTDSAKILAIFPTPCYSHQSVFKVYIEALADRGHEVVVVKPTTKVRYNDDKNIVEIDASLSDNYFAKLVHDSMSFRKRGLVADSDTVTAYNYMGLVRMLRDQFDLPEVKKLIENRHLFRFDVLITEAFLDYTLIFSHLFGDIPVIQVSSGYGVPENFETMGAVSRHPVYYPNLWRDRFRDMNIWETIREIYMELRLQNEFSVLLAEQNNLLKMQFGANVPALEKLRDNVEMLFVNVHPFFDNNRPVPPNVQYLGGLHLHDKRVKPLSEHVQRFLDNSTNVVYVSFGSSIDTAQMDNEFLDMLLETFRSLPQCNFAWKFDSIIDSSRVVPDNVFIQSWFDQYSLLHHKNVKAFVTQGGVQSTDEAIAALVPMIGMPMMGDQSFNTNKYIDLGIGLVVDTSTVTSQQLIKAIQTITVIDYDKYKGNLMELRKLIRHQPVSALHKATWFTEHVITHKKKNYYKTKSSNATYDEYYMFYIIIPFASVFIMNHIHQLLRMSFS

SEQ ID NO: 7117 - protein, 531 aa, Caenorhabditis brenneri
MKVLTLLLLLIGAVSSYKYVVFVPNMANSQVQFCARVAEVLANGGHDVTMLFISHLPDYKTDVKIPKGVKTYNLDAFVEGLTKKSIEKEQSAMIFKDTGLKDMPAMMAMFSRFGKMFQDGCRMMVQNKEFMAWLENEKFDVAYAYIYSSCPIGLIHAAKIPSWVWLNSGPLMDFVAETVGVPIIPSYVPPVMMESHDEMGFFFRTKSFIGHVLMGLLHRRMTSNGETQIFREELNDPNFPHTMDLGAKCPLIIVNTNEIYDLPRPTLAKVVNIGGLGVGFDAAKPLTPEFKKIVDTGKGLIVFSFGSVAAAHEMPLAWKNSILEAFASFPDYQFVMRYVADDLNDRLPKNVHLFKWLPQKDLLLQNKTKAFITHGGYNSMQEAISAGVPLVTIALFGDQPKNAKVAKKHGFAVNVQKGTLSKETIVEALKEVIENDSYKQKVSRLSAMVRAQPMKPAERLLKWSEFLAEFKQLDNLEPAGQKLNFFQYHSLDVIGFLFVVILLVLYVIFRILKALVRCCCCRRRSDKKKTE

SEQ ID NO: 7118 - protein, 530 aa, Marmota marmota
MAPGLLPAALPLCVCLLLASSSAQAGKLLVVPMDGSHWFTMRSVVEKLVHRGNEVVAVMPEVSWQLGQSLNFTVKTYSTSYTLEDLDRGFNFFVDTQWKTPEQSMYSAAMGSSKAFFDITFSRCRSLFNDKKLVEYLKETSFDAVFLDPFDVCGLVVAKYFSLPSVVFARVVFCNFLEDGAQCPSPLSYVPRVFLMSSDALSFMERIRNHLNYLEEYLFCPYFFQTALEVASEILRTPVTIGDLFSQISIWLLRTDFVLEYPRPVMPNMIFVGGINCHQRKPLPKEFEAYVNASGEHGIVVFSLGSMVSEIPEKKAMEIADALGRIPQTVLWRYTGTPPSNLAKNTKLVKWLPQNDLLGHPKTRAFITHAGSHGVYEGICNGVPMVMMPLFGDQMDNAKRMETRGAGVTLNVLEMTSDDLANALKAVINDKSYKENIMRLSRLHKDRPIEPLDLAVFWVEFVMRHKGAPHLRPAAHDLTWYQYHSLDVIGFLLAIVLGVAFIAFKCCAYGCRKCFGKKGSVKKGHKSKAH

SEQ ID NO: 7119 - protein, 524 aa, Helicoverpa armigera
MTDFSYFIVVHTLVLLLSQGEAAKILVYINTPSISHQVVFRPLTQALAARGHEVTVVTTDPAFPKGGAPPNLTEIDVHDISYNIWRTEVMKASRGEEIDDILAPLRVMLYAVEKVLEAQLQHPEVQALIKGTKNKHFDLMIAEAAMPMLLAFAHIYKTPVIQASSLGAYFGNYETVGAPTHPFLYPHVMRRKLNNLSVWDKVTELYDQYRLEKLIADAQPFENALVEKYFGPGIPPVSELLKNVDMLFLNVNPIFGDVRPVPPAVVFMGGLHQNPEKDLPKDLKTFLDSSKHGVIYISYGTNVDPALLPLEKIQAMIGVLSQLPYDVLWKWSKDELPGRTPNIRISKWLPQSDLLKHPKVKLFITQGGLQSTDEAITAGVPLIGMPMIADQWYNVERYVAHKIGVRLDMETLTEENFKNAINKTIGDDSYRKNIVRLRNIIQDQPQKPLDRAVWWTEYVIRHGGAKHLLSPAAHITWTEFLELKLVFTLLAVFLTAVVAVLIALYLVFTFVRSFLKGSVKVKRS

SEQ ID NO: 7120 - protein, 517 aa, Trichoplusia ni
MHIYFHLLTFFTVLVNLNGAAKILGVFPTPSISHQVVFRPLMLELVKRGHDVTVITTDRAFPIGETPANYTEIDVHEESYRIWRDRIMKASSAKDGIQTLIQGLRIFPDVFDTQLSDENVQRLLRDNKHFDLLILEACFRPALIFSHIYKAPVILMSSFMAVLDNYETIGAPKHPFLYPEYLNQKLSNLTMWDKITELYTSYKMKFLYARNVDYENNIVRKYFGENTPSLAELGNNVDMMFLNVYPVFAGIQPVPPSVVFTGGLHQKPEKPLPQDLKTYLDSSKNGVIYISFGTNVDPTQLPPERIQVLVKAFSELPYDVLWKWNGDELPGRTENIKISKWLPQSDLLRHRKIKVFVTQGGLQSTDEAITAGVPLIGVPMMGDQWYIVERYKTHKIGVRLDLGDITVESFKTTLLKVIGDDSYRQNIVRLRSLMRDEVQTPLERAVWWTEYVLRHGGAKHLRSPAANISWAEYLELELVLTLLAGLTVTLALFVFFIYNFYKLLVKNNVTTIKSKSD

SEQ ID NO: 7121 - protein, 519 aa, Chaetura pelagica
LVLLLSMLHVAAGGKLLVVPADGSHWLSMTEVLDQLSLKGHEIVVLAPEHNLYIKPRKSFVMKSYPVSFTQEELEHTFWKTTQNAFFKGSLLERILKNYEGVKNTSVIFLDTCSSLLYDEELMKYLQDSKFDAVMVDPVLPCGPILAEHLSLPSVYFMRGLPCTLDYKATQCPSPYSYVPRSFTDNSDHMTFMERVKNLLIGFSEHLLCYVFYLNHENLASEFLHRDVAVLELFSKASIWLMRYDFVFEYPRPIMPNIVYIGGINCEQKQPLSKEFEAIVNASGEHGIVVFSLGSMVSDIPRERAKEIAKALGTVPQTVLWRYTGEVPPNLPKNVKLVKWLPQNDLLAHPKTRAFITHGGSHGVYEGICNAVPMVLMPLFGDQMDNAKRIESRGAGLTLNILEMTSEDISTALKAVINDKKYKDNIQRLSDLHLDRPIHPLDLAVHWVEFVMRHKGAPHLRPAAHDLNWIQYHSLDVMAFLLAVVLLSLFISLKCCLFCCRRCCCKKGRTKKATKAKSH

SEQ ID NO: 7122 - protein, 520 aa, Spodoptera litura
MKWSVLISLIYFLSDVEGLKVLICFPLPVKSLSILGQGAVRHLMEAGHDVTYITVYPLKIKAKNFRQIDISTNTALVASDESLTMEYILNHKLERNPPNQVQEFAVEALKMTLNHENVKKLLEDPNEHFDVIITDLIESEVYAGLAVLYNCPMVWLYSMGAHWQVLRLIDVASNPAYDPDYLSPNMPPLTFTQRAEELWSRIYWQYLKTFYTQPEERSIYEEVFGPLLAKRGRPLPDYEDVMYNASLIFANEHDATRNRASTPQNFKYIGGFHIEEPVKPLPKDLQDLIDNSKHGVIYFSMGSVLKSNSMPRKLVMDLLQMFGEFKQTVIWKFEDNSLQGVPKNVHIVNWAPQPSILAHPNVKMFISHGGQLSSLEAIHFGKPIIGIPVFFDQFTNIHKAAQNGYALRVPLSQNLPRDLKPAINTMLSDDRYAKQVKELSDLYHDRLTKPGPALVYWVEHVVRTRGALHLRSPALHVPLYQRLYLDLLAIILIITFSIIFLLIRLCNNKNGKRNDKKKSN

SEQ ID NO: 7123 - protein, 513 aa, Athalia rosae
MRLIATLVLLCLMGREGFGAKILGLLPFPGRSHLSVSSPVLHGLAKKGHDVTAYVPFSTGFNATNYREIVYEHTPITNSIDVLSVVNVNAIQKPFGFFFMGIFTTEMALNTTEVRDLIRSEEKYDLIVMEEFLNEAFFVFAHKFKCPVVLVSTFGSSAVVDQIFGNSAPLSYVPSLFLVADDRMTLIERFQNVLVTVYTNLLRDLFYMPRQQALAVKYLGDSGVEIPDLGEIERQADFILVNSHPAFSTPKPYMPNMKDVAGMHLKPVKPLPADLKEYLDSSKTGVVLFSLGSAMQSVKMPENVLRVLKKSFERLPFDVLWKWENDTMTDKPKNVRIGKWLPQNDLLAHPNLKLFITHGGISSLMETVYHGVPIVATPLFGDQMRNIMLAERRGYAIYLDFQTMTENQIYEAVMKVANDPKYKENVKKVSAYWRDDLNHPLDQAVHWVEYVLKHDGAKHLKATVTEQTFVQYLLLDVAFLILTILTLTFLAVRRMFRSICRRTGPKAISKKTN

SEQ ID NO: 7124 - protein, 1056 aa, Pieris rapae
MYRIILLTFLITAQKSNGARILGVFPAASISHQVVFRPLTQELARIGHEVTVITTDPAFNDHNRPENLTEIDVHDVSYNMWLQRIKDTRMEFGDKSGVFKVAEEMATFFGTIIEEQLKTDGVQKLINDKSKKYDLIIIEACARPAIMFSHLYKAPVIAISSFGMAFGGEDLVGAPSHPILYPNMMHQRLHNLTFWEKFNEFYKHYWILNMWESTENKEFDLLKKYFGGDDVPSYKELYKNVDMMFLNIHPMWSHNQPLPPNVISIWGIHKNPQKSLPQDLKAYLDSSKNGVIYISFGSNARSSMLPPEKIKILINVFSKLPYNVLWKWETDVLPGKSENIKIAKWLPQSDLLRHPNIKLFITQGGLQSMDEAMNAGVPLIGIPMLGDQWYNVESFEYHKIGVQIDFDTITEEQLTKAIGTVINDKSYKENIIRLNRLMNDQSQSALDRAVWWTEYVLRHGGAKHLRAAGANISSFEYYEIEFLLKLVSLVFSIAAIILYLMYRLFRIVVPSNLPSSKSKTSYVNIYMVALYTMIKSTVLLNIIFLLSQINAARILAIFPTPSISHQVVFRPLTQELARRGHEVTVITADPVFTKDNRPKNLTEIDVHDISYRAWRDGIDERDTGFGKRNGVFQIVKNIEEFLQEILELQVNTEEIHALLNDDSKFDLLIIEACVRPALMFSHKFKVPVIQISSFGFMLGNDEVIGALTHPILFPIIMRQRVFNLTFWEKLYELYLHYWITYHWHMSETREHEALSKYFGNNVPSYKELNNNIDMIFLNIHPIWTNNQPLPPNVISIWGIHKNQEKPLPQAIQEYMDSSKNGVIYFSLGSNAQSTMLHLDTINMLIDVFSKLPFNILWKWEKDELPGISKNIKISKWLPQTDLLRHPNLKLFITQGGLQSTDEAINSGVPLIGIPMLADQWYNVEFYEHLKIGVGLDIETITREKLLKAIETVISDKSYKENILKLRNILNDQPQSALDRAVWWTEYVLRYGGAKHLRAASANLSWFEFYEVEFILKLLMLICATLLVLIITSHLVYRRLRCFMYSHKVESIEKKQM

SEQ ID NO: 7125 - protein, 532 aa, Myotis brandtii
MACLPRAVRGISAGVFLLGLWGVTLSDKLLVVPQDGSHWLSMKGIIEVLSDRGHDIVVLVPEVNLLLKESKHYTRKIYAVPYDQEELQRRFRTFGNRHFAERSLLTAPLVEYRNNMVVVDLCFINCQSLLRDSATLSFLRESKFDALFTDPAMPCGVILAEILGLPSLYLFRGFPFALEHTFSRSPNPVSYIPRCYTQFSDRMTFSQRVANFLVNHLENLVFHFLFSKYEDLASDLLKRQVHLPTLYQKGSIWLLRYDFVFEYPRPVLPNMVFIGGTNCKKKGALSQEFEAYVNASGEHGIVVFSLGSMVSDIPEKKAMEIADALGKIPQTVLWRYTGTRPSNLAKNTILVNWLPQNDLLGHPKTRAFITHSGSHGIYEGICNGVPMVMMPLFGDQMDNAKRMETRGAGVSLNVLEMTSEDLENALKTVINDKSYKENIMRLSSLHKDRPIEPLDLAVFWVEFVMRHKGAPHLRPAAHLLTWYQYHSLDVIGFLLAIVLGVAFVVYKCCAFGYGKCFGKKRRVKKSNKSKAH

SEQ ID NO: 7126 - protein, 519 aa, Wasmannia auropunctata
MRVVTLVLLSISLFCTIQHGRGYNILGICPSASYSHQQSFQALMKALASRGHKVTVLSTVPLKNPPSNYENVDLSFSYISKDCTGLRHVGAYAILHQNLWGANLICRHQLFSPAIDKLIASNKTFDGIIIEQLWFQCYYALVKHYNFPVLIGFLSVGNLPYVMDSVGNPDDPNFNPDMAYPFTDKMTINERIMNILYTTYTRLYYRYWHLPRAQRMANERTPGTSVYDIDKNFSLVILGNNHVFGYPKPLLPHVIEVHSLHISENPGSLPKDIREFLDNAQDGAIYFSLGSNLQTDQLPAGPLTALCNALGSLKQRVLWKHDGNMAIHPTNIKFVKWVPQQAVLAHPKVIAYMMQGGLQSLQEAVHYAVPVVAIPFFGDQYFNARKILDAGIGLTLDIDTITENSIVQTLTEIVENKTYLNNIETMSAIVRDELVKPTNRAMWHVEHVLKFPNSRHLRYHGHDMSWTHYYATYLCLSIYFALLICINYILYNTIVSAFIKIKCISILKQWISNWKQKLD

SEQ ID NO: 7127 - protein, 520 aa, Trichoplusia ni
MGALLHLLACYILFVNVNDAARILAVFPTPSISHQVVFRPVTQELVRRGHHVTVITTDPAFPKGGAPANLTEIDVHDISYGIWKELFMTAPKGGKDDIVHHLKIFLNIFIEVFEAQTKTENVQRLIKNRDQKFDLIIVEACYRLGLGFRHIYEAPVVYMSSLGGVFGNFEVIGAPTHPTLYPTSVRQRLNNLTMWEKFTELYNHYTYIYMYYVQETAENNLLKKVFGPDAPTISELYNHVEMLFLNENPVFVGSRPVPPTVVYMGGLHQNPQKELPKDLKSYLDSSKNGVIYISFGTNVDPTLLPADRIQVLVKVFSQLPYDVLWKWNGDELPGRTANIRISKWLPQSDLLRHPKVKLFVTQGGLQSTDEAITAGVPLIGIPMLGDQWYNAEKYESHKIGVRLDLDAITEENFKEAINRVIGDDSYRKNIIKLRTLMRDQPMSPLDRTMWSLEHLLRHGGAKHLRSPAANISWAEYLELELVLTLLGGMFTVISLVVFGIYYLFKFFLRSKVADVKVKRS

SEQ ID NO: 7128 - protein, 526 aa, Cyprinus carpio
MRLIICVVYLAVFGPAQCGNILVWPTRGSHWINLKIILETVIDKGHNVTVLVPNPSPFMDTKESDRFSYQYFSVSMTTQDMQDFLNELVHFSVYETDQLNLLQIQIKFYELASKHQDMALSYCDGILQSPELMDKLRDGKYDVVLSDPHFPCSDIVAEELSVPLVYMFQFSIAHVLERMCGQIPSPPSFVPAGMIKLTDKMSFTERIINMLFYLSQDAFAILVWKRMDSYYTEYFGRPTSYCEMMGKADIWLIRNYWDFEFPRPFLSNFKYVGGLHCTPAKPLPKDMEEFVQSSGDDGIVVFTLGSMIDKMPKETSNMIASALAQIPQKVLWRYGGEKPDTLGENTKTYKWIPQNDLLGHPKTRAFVTHGGINGIHEAIYHGVPMVGIPLFGDQTDNLAHMKAKGAAVVMDNIKTTQPQDLVDGLNAVINNPSYKENAMRLSRIHHDRPVKPLDEAVFWIEFVMRNKGAKHLRVEAHNLTWYQYHCLDVFAFLITILTVVLYVFFKMCKFFIIRCCFRSKRKSKKE

SEQ ID NO: 7129 - protein, 512 aa, Helicoverpa armigera
MRSLAFFVLALTITDNDAATILAVFPVPSISHQIVFRPVIHELAKRGHEVTIITPDPAFPNGGGPATLKEIDVHFTYEEWKKFYEFTSVGDDDQVKQMEAVLKIIIHIFEVQMRVDEVQKVLKEKFDLVFIEALVRPALTLTHIFKVPIIQMSSFGPINFNTATFGSAWHPFLYPMNLSQKINNMTMWEKLQELWTFYQIEKVYENLEVDEHRMAQRLFGPDIPKLKELKDNVDMMFLNIHPLWDSNRPVPPSVIYMGGVHQKPQKELPEDLKTYLDSSKNGVIYISFGTNVQPSLLPPEKVQILVKVFSELPYDVLWKWDKDELPGRTSNIRIEKWLPQSDLLRHPKIKVYVMQGGLQSTDEAITAGVPLIGFPMLGDQWFNVEKYEQQKIGLRLDLDTLTEEKFKNALNKVIGDESYRQNIVKLGKILNDEPMTPLERAVWWTEHVLRHGGARHLRSPAANMSWTQYLELELVFIVLSVVLVFVLLILLLVYKLYKYISLYSIQRKLKDH

SEQ ID NO: 7130 - protein, 522 aa, Linepithema humile
MRILLLIFPWLLCSSICHGYRFLAIFPFNSHSHFMMFEQLVKGLIKKGHQIDVISNFPLKKPYPNYTDIVSFTPPVTLTNSLTYEFLTETLVGISPVFIVAGIAGNDLCKYLALPKIQELVRNPPKDPPYDAVLMEVFGAQCFAVIPHILNIPVIGVSSTVLYPWLYQIIAQPHNVAFVPNNCITGLTGSMNFLERLYNTVNMAYNNLLFNYLTSGQDEILKEHFGPNIPSVRELERKVALILVNSHIAVNIIQPTTPAVVDVGGLHVVDNDLTLPPALEKWMNESRDGFIYLTFGSMVMIETFPLKFLDILYSSLSKIAPVRVLMKVPRPDKLPPGLPKNIYTSPWMPQIKVLKHPNIKGFITHSGLMGMQEALVCGVPMIGIPLFGDQFINIDMFVGKNIAIKLDFHTMTEKDMDEALNAILWNPIYIETARNLSRKFLDRPMSAIDTANYWIKYIVKYGSDALRSPAMDLYWWQIYLLDIAVFFLLCAIIVIIVIRYFVRLLLQMINDNRNSSQTKKTN

SEQ ID NO: 7131 - protein, 434 aa, Spodoptera litura
MKGERGGARDLLAQVKEIMEALDKVLDRQLEDEKIQTLINDKSQKFDLLMLEGVLPPLLVLSHIYKAPVIQISTFGALQGTYDSVGAPTHPLLYPINTRHKLRDLTLWDKLTEALTYYAAENLWYNFYYDLNNNILKKHFGPKVPTVEELTNNIDMIFLNIHPMFEGIRPVPPNVIYLHGLHQKPAKDLPQDLKSYLDSSKHGVIYVSFGTNVDPALLPPEKIQILVRVFSQLPYDVLWKWSKDELPGRSPNIKIAKWFPQPDLLKHPNVKLFITQGGLQSTDEAITAGVPLIGMPMLGDQYFNVERYVYHGFGIRLDMEALTEEKLKHAINATVEDESYRRNMERFRTLINDSPQTPLERAVWWTEYLLRHGDAKHLRSPSANISWRQYLELDLVLVLLSVLFIAVAVTVILLRLVYRVLRFYIVGDVKIKRN

SEQ ID NO: 7132 - protein, 525 aa, Pseudomyrmex gracilis
MRISMFVWLLLYLSTCHGYRLLGVCPFHAKSHFIMFEQLMKGLARKGHQVDVISAFPLKKPYPNYTDIVKLKPPVVLVNNITYDFMRQTLNANPTFAIATIGGNDMCKNLGHPEIQKLVRNPPKDPPYDAIILEAFGFHCFAIIAHLWNVPLIGISTTSLYPWLHRLIGQPENLAFVPNNYVTYVDDLNFWQRLYNSGNALFNKLYFNYLTTKTQNNILREHFGPDAPTVQELEKKFAIILINSHIVLNKLQPLVPAAIEVGGLHVQDENLKLQPELEKWMNDSKDGIVYFTFGSMVMIETFPREFLNILYSSLRKIAPVRVLMKIPNPDKLPSGLPENVYTSPWMPQIKVLKHPNVKAFITHGGLMGTQEAITYGVPMIGIPLFADQFKNIDSYVVKNAALKLDINTLTEKDMDEALHEILRNPIYKESAQNISRRLTDQPLSSLDKAIYWTEYVIRYGNDALRSPAVDLPWYKLHLIDVIAFLLLCALGLIAVVAFVVRAILEVTTNHGKTIEINNLESKKVK

SEQ ID NO: 7133 - protein, 533 aa, Camponotus floridanus
MLKKFIFYCTLMGLATISSSLSILLVQPIPSTSHHVWTMNLLKGLLSKGHHVHIVDIHEPNIKSKLAENMTYGIFDIMQQLHEAKDFNPSDWQKLNIFQMMYTVYDTGLLTCEKIVESREAKELLEMIKNVEFDVIVHDITLLQCLYGLWEVAKGEPPVVGYIPFGLAPWLKDYIGGTYYPTVRPYSCVDFAKPEGLWQKTWNTIYYIVDDFLRSYYYMPLSQRIAERYIGQKIRPLHELEKSITILLINTHSAFEPAIPLPPNAIEIGGLHVEPLQTTDEKTVIYSDNIREFLDGAENGAIIISLGTNVNWKSVGLDKLKAVTQALSKLKERVIWKLEIELSFHVSNNVMIVKWLQQNEILSHKNIKAIWTHGGLLSTQEAIWKGVPVIGMPFYLDQIPNVELLVLKGAGVRLDFATLSTESILDAFEKVLYNRNYTKNMKRLSNEFRDRPVPPLDLAVWWIEYAARNPHGSLESSLRSQSWVEQNLIDIYAFLFLILIVILSAILFILKKLFKFYCNRVYSVSKLQKRKQM

SEQ ID NO: 7134 - protein, 534 aa, Ornithorhynchus anatinus
MALGYQAVFLATVGVLFFITSSPPFAEAGKLLVIPMEGSHWLSMHPVLQELRHRGHVVFVLAPEVSELIKDDEFFTLQTYPVPYRKEELKAQVQSFALGNFKGGSWIERFFRTYEKMKTSAAIFLSACTHLMNNRELLKNLNVRKFDAVLTDPMDPCGSIVAEYLSIPAVYFLRGIPCGLDFDGTQCPNPFSYIPRMFSRNSDRMSFLQRVKNMVFAVSFSFLCDFIYSPYAHLASEVLQRDMTVVDVLSYGSIWLMRGDFVLDYPRPIMPNMVFIGGINCAHRKSLSQEFQDYVNDSGEHGIVVFSLGSMVSEIPVKKAMEIAEALGRIPQTVLWRYTGKPPANLAKNTKLVKWLPQNDLLAHPKTRAFITHAGSHGIYEGICNGVPMVLLPLFGDQMDNAKRVESRGAGVILNVLEMTSEDLSNALKTVITDKSYKENIMRLSALHKDRPVEPLDLAVHWVEFVMKHKGAPHLRPAAHDLNWFQYHCLDVIGFFLVITLSVFFIFFKSCMFCFRKCFPKKEKAKKSQKNKSH

SEQ ID NO: 7135 - protein, 1063 aa, Copidosoma floridanum
MKITILLIVLFTLSLASESRAYRILAVFPYNGKSHNIFFEALMKGLAKRGHQVDVVTHFPLKKPVKNYNDIISLDGTLESVMNNFTMEFISFMNDDSTNVISNLYGNRLCSFLGLDSMQKLMNNPPRDPPYDIVIVEAFTANCYFGLGYIFKVPVLAVSTAAEFPWISDFIGNDDNLAYVPNTFYHSIGELNYWGRVENFVTYFMELRKYHSATAKIQTEAMRKYLSSDIPDIREVEKNVALTLVNSNPIISGIKPITPSLVQVAGLHIEENDETLSPELKEWMDEGKYGVVYFTLGSMVLMETMPVEQLKGIFSALKKIAPIRVLVKIVDKSKLPSGLPKNVKTLPWTPQIPLLAHPNLKLFITHGGLGGLIEALHFGVPMIGIPLFSDQFRNCKLFVAKQMMVTISLEKLSEQTLDSALQTVLYDPIYKEKSVYYSKLFRDRPMSPMDTANFWIEHVIRNGPVLRSPALKYTWWQLALLDVYALFLFSFILALLLATFIIRMILKTILKMVSRNYHIETNKKKIKSDCVFKREKAFKMLQKTLFFLLFIITSLHQFSAYRILGIFPLNGRSHEMMFESLMKGLARRGHQVDVVTHFPPKNPPKNYKNIINLSGTMESLVNNFTIDFVLGMADDVGTHVATVYGNRLCHLMGLEEMQNLLKNPPSNPPYDVLITEAFGANCFMGIGRHLNIPVIAASSAIEYPWVSEFTGNNDNLAVVPNALYMAFGQMSFWQRLKNTLVYHNEIRKFQKLTEHPQTELMKKYINSSTPNIREIERSVALTLVNSHPIIYGVRPVLPTVVEIGGLHVEESESTLPQDLKKWMDESNSGVIYFTFGSMVLVETLPEATLKTLYRSFAKIAPVRILTKVADESKLPPGLPENVKTLPWIPQQAVLAHNNTKVFMTHGGLMGSQEALYYGVPMIGVPLFADQPRNVEAFVAKNMSIKLPLADFSEEKLDAVFKAILYDPKYTKYAKYYSNLFRDRPISAMDSAVFWVEYVARNGPNVLRPPSLTLTWWQLALIDVYGFIFLVFIVVKFMLFCAIKLVIQKLLSYFETKESTKKKL

SEQ ID NO: 7136 - protein, 529 aa, Drosophila willistoni
MLLWRLIAISMLLAAWGPVKSESAQILGLFQHPGKSHFAFFRPIFEELAKRGHNVSMYSYFPLKKPLANYTDFVFEGMGLLTDVIDLKGFDSEWKPLGLPFKIPTYFRLHDWGINACRVAMNSPLIDQLLKSPQRYDLIILENFANDCMYAVAHLLGAPVIALSSCAIMPWHYRRMGTPFINSVMPMNFLPHTDEMTFIDRLNNFIHFHTVNFLYNFVTQPATDKLIRERFGVGLPPIDDIVKNTSLMLINQHHTLTGSYPYAPSVVEVGGLQIAQAEELPAHFKSLFKRSHTGIVVISWGSMINPTTLPAAKRRALFDSISSLDEYSFVMRWANGAPPEDKPQNLHTFDWLPQRDLLCHPQVKAFISHGGLMGTTEAVHCGVPILATPFYGDQFLNAATIAKRGFGVIVDYREFDTDHITKALHVILDKNFADNVKRLSQSFRQRPQAPMDLAIWWIEEVIASKGSPQLLSQARYNNWFVQNSIDVYLCLLGIVWLLGRCIRLVSRLIRRVLALGRRKPDVENKMKQH

SEQ ID NO: 7137 - protein, 518 aa, Spodoptera exigua
MTSTIKLFLLTLTLSLTYNDAAKILGFFPLPSISHQVIFRHLTEELARRGHEVTVIATDPAYPNGDGPANLTEIDVHDFSYEQWRILYKLTSTGERDLIGQIRGAYHTLVNIVEMQLKVEPVQKILKEEKFDLLLIEACVRPALLLSHVVKAPVIQVSSLGTVDFNVGTIGSAWHPFLYPDTLSQRSYNLTKWEKIREFYTYYKLNRVMKVVEDAENLMAKRMFGPNVPSIDELKNNVDLMLLNTYPLWDNNRPVPPSVVYMGGLHKNPQKELPKDLKEYLDSSKNGVVYISFGTNVQPSLLPLDRVQLMAKVFSQLPYDVLWKWDKDELPGRSKNIRISKWLPQSDLLRHPKIKVFITQGGLQSADEAITAGVPLIGVPMLGDQWYNVEKYVHHGIGLQLDLLTMTEDGFKNAILTILNNDSFRRNMEKLRSVIYDQPQPPLERAIWWTEHVLRHGGARHLRGPAANMSWTEYLELELVFTVLAVVLAITLVLFYLMYSIWKYLTNIINPSKKLKKN

SEQ ID NO: 7138 - protein, 551 aa, Necator americanus
MITLLTLLFTVYSTFGYKMAIFVLDLSNSQLLFNERVAETLAEAGHDVTLVMIISQSDRDNSDIKIKSNVKLHVVNAPINFTRKEMEKRQEELTFKPSTYNMVSRLSAQTSMIVDTCRATLENKQLLQWLKEQHFDLAFAHMFDVCAVGLVHAAEIPSWIWLNSGPVIDYVAYLIGLPIIPSYTPPIMMAAVGEMNFLQRVKSLIGHGMMKLFWRRLIADPETQLFRTHISPEFPDLMDLAAKCPLVMANTNELYDMPRPTLAKVVNIGGVGVEIKDQKPLPNVALSYFFPKNQYFNVSTFQHIAEIVDSGDGTIFFSFGSVVASYKMPLEWKKIFLDTFRRFPKYQFLWRYEEDDIKDMLPSNVHLFKWLPQVDLLRHPRTKAFITHAGYNSFQEAILTGVPLIAIPLVGDQPKNAASAEHLGIGVVLNKGELSVSVVSRAIEEVITNTRYKKEARRLSRMVGNKPVTPTQLLVKWSEFVAEFQTLDNLVPAGTKLNFIQYHSLDVIFCLFLLVILILALIRFLFKLAIRGTFALVMLWPSFRSEKQKTM

SEQ ID NO: 7139 - protein, 518 aa, Habropoda laboriosa
MLVSPLVLVLLLFRQFSPAIGFNILGICPSASYSHQQPFQALMKALAARGHNVTVISTIPSKKPTKNYEDVDLSFTYERRDCTGLRHVGAFTLLQKNMREANELCEKQLFSPAITHLISRNKSFDAVIIEQLWYQCYYALVKHYNSPVLIGFLSVGNLPYVMDSVGNPDDPLFNPDMAYPFTNRMSMNERIWNIVYTAWTRIYYRYWHLPRAQMIVNKWTADVSVDEIDRNFSLVILGNNHVFGYPKPLLPNVIEVHSLQITERKEVLPKDIEEFLDKAEHGAIYFSLGSNLQTHQLPVGPLTALCNALSSVKQRVLWKHTGDMAIHPGNIKFVKWAPQQAVLAHPKVMAYVMQGGLQSLQEAVHYSVPVVAIPFFGDQLFNARKILDAGIGLTLNIDTITEESIVQTLTDVIENKTYYNNIKIMSEIVKDELVKPMDRAIWNVEHVIKFPNSKHMRYHGRDISFVDYYGTMVILVLPLFFTLLCGYLIFIRFVNIKEYVSMIKLQVRLRYFTKSKAE

SEQ ID NO: 7140 - protein, 524 aa, Musca domestica
MLATALIWIAALLAVIGPLPLTVDGRRHNLKILGLFPHPGISHFHFFHPILRGLAERGHDVTVVSHFPDKSPPVGYTDIPLTGKETLANSVDLKVFENRRFYNHFLEFFLLYEWGKEACNHTLRSEALYKVMRQKVRYDVILLEQFNSDCMMGVAHMLQAPVIGLSSCAMMPWHYERMGMPIIPSYIPALFLGQSEDMSLGGRIANWISFHALNLMYKVFSIPAADALVQYKFGHDVPSVGELVKETTLMFVNQHFSLSGAKPLPPSVIELGGVHIQKAKPLDVDLQKFLDNADNGVVFISWGSMIKAETLPVAKRDAIVRAVKRLKQRVIWKWENETLANKPDNMYISKWLPQRDILCHPNVKVFMTHAGLMGSSEAAYCGVPVVATPMYGDQFLNAAAMKQRGMGVVLNYEDIDENTVLKAIKKVLEKQYYDNAKMISYAYKHRPNTALDTAIWWVEYVANTEGAPLLKSSSTYMSRFVYYSLDVYTVLGLVVLTSVVTWGLLMRKLKTATRNRGTTKVKSN

SEQ ID NO: 7141 - protein, 519 aa, Ooceraea biroi
MRVLPIILVSLSWLMCSAYRFLGVFPQTTRSRFVILETVMKGLADKGHQVDIISSNPQKKPYPNYTDIAKLPLPQFFLNNMTYEFLRQAAGPNPTNIIATKFGNYVCEAWLGNSVIQKLVRYPPQDPPYDAMIMEVFSAHCFAAIAELLNIPLIGVSSTSMYPWLNDLIAQPENLAFVPNSYVNLRVPMNFWQRTYNVLNTLYSKLYFNYLTRSQDDIVRKYLGPKLPSVHKMNLSLILVNSHIILNGIQSMTPAVVQVGGIHIREDDSPVPHDLRKWMDDSKEGFVFFSFGSMVLIETFPRKILDVFYTSLGKIAPIRVLIKVWNPKKLPPDLPKNIHTSAWMPQLKVLKHPNIRAFITHGGILGTLEAIFYGVPMIGIPLFIDQFKNMEACVTRNVAVKLDVHNITEQNMDAALNAILHDPRYKENIRHLSQRFHDQPLSPVDTATYWIEYVIKYGDDVLRSPAMDLAWWQLSLVDVAVCFLLCAAAIITLAVFIVRFVMKMINRNQHRLLHSKKTN

SEQ ID NO: 7142 - protein, 529 aa, Anopheles gambiae
MISSKNNVAAVAFLCLVFVIGNNRVMVESAKILGIFPTASKSHWILGSSLLKELAQDGHEVTMISPFPLKNAPKTYRDVNIAYNTNLFDDIMDEVFEKIDDSIVEKMMELGTFVNEITNTTLSSPEVQALIHSDETFDLLILEIFLDDALLGFADRFNCPVVGMSTFGASSWVNSLTGSPQPLSYVPHPMSSFTDKMNFWQRLGNVLFSAFDETLLTAMCNPIQQRHYNHYFPNATRSLDEMRHHGVSLVLINSHFSLSFPRPYLPNLIEVGGFHVNRKVNPLPEDIKSFIEQSEHGVIYFSMGSNLKPSKMDKQKRNDVIKVLSNLKQNIIWKWDDDTLVVDKKKFLIGKWFPQDDILAHPNVKLFITHGGLLSCTESIYHGVPIVGIPIFGDQLLNMARAEQSGWGIGVTYTELNEQTFSKAITTVLGDPSYTANVKTISRRMRDQPLAPMDTAKFWVEYVLRHDGAKHLISSAQDLNFVQYNNLDVYLFIVAVFLTIVFVVRLSFRKLYRALFKRNRNTPTGKKTN

SEQ ID NO: 7143 - protein, 428 aa, Drosophila busckii
MELKLISCCLLSCLAAAYAGNILAVFPHDGYSHFKVVTPVLEELARRGHQLTVISFVNNTAANYEQLLLATEAEQATTINREYLNGMQTGRSLKNMFVEYFDLFKGAQTNCERLFASGYVQQVLQRHQRQPYELLLTEYFSSDCQLALGKLLGLPIIGLSTCALMPYHYDRIDLPDTPSHIQSQYVGYAQRLSWFERLENFIQAKSLKLLYAHHTNRADNALIKRYLHLDMDVAAVAREQTAFIWVNQHYSHLGSRPRTPQLLEIGGVHITEQAKQQLPTHIAKFLQQSPQGVIFISWGSQVLASSIDQHKLQSMLQVLSAQPLNVIWKWEADKLPLMNNEKFLFVKWAPQLALLAQAEVKIFWTHAGLLGMTEALHCGKPMLMTPIYGDQFLNAHAAQTRGVGLILSYEDIKAAQLKTKLAALSKPE

SEQ ID NO: 7144 - protein, 437 aa, Myzus persicae
MIVLKSNKMYLHFFSILIYSFAGSWIPAPVEGARILAVEPVGGKSHWNFMSGILRALVDKGHNVTVFTPFPEGNRENYTEVSTSTKAMTVLLDAGIEDLMGKFGDPIKIISLMSEMSISMCDVIYENSKMKEVLANKGSDFDIVIIEPAFSECVSYLAAKLNLPLIYTIPIPTLGVMERIFTGHVSNPAVVSFNLASFGVPKTFVQRTVNIALWTYAITVRQINELILKYKEPREYDLYAPIPPSLVFVNRHFVMEPASPIPSNVVEIGGIHLKAAKKLPKDILEFIEQSPHGVVYFTFGSTVKMTSLPENTKKAFMDALAQIPQRVLWKYEDEIENLPKNVMIKKWLPQREILLHPNVKLFISHGGISGLYETIDGGVPILGFPLFGDQPKNVDSLVNAGMAISMDILSVTKDEFLKNVLELLNNKKYMKNAKTAQ

SEQ ID NO: 7145 - protein, 521 aa, Microtus ochrogaster
MAEQRSWLPVSLFFTKVLFLEAAKILTIGAMGVSHYRLMNRVSLLLQDHGHNVTCLLYEKMSTPDLKKENMSYEIITWSLPEDQEKEFDNRFSLLVEELFIDRFNHHTLIKIYKYFADVCSLILSREDIIYYLKNKNFDLVFLDATESCFFLIAEKLEKPFVAFLPVQFSFLDFGLPSPLSYVPVYGSRLTDQMDFWGRVKNFLMFFDFSLKQRQIFSQYDATIQEHFAEGSRPVLSDLLLKAELWFVNSDFAFEFARPLLPNTVYVGGLMDKPARPIPQYLEDFITTFGDSGFVLVSLGSVASLYQTKELIKEMNSAFARLPQGVLWTCKDDQWPEDVRMASNVKIMDWLPQVDLLAHPNIRLFVTHGGMNSIMEAIQHGVPMVGIPFFADQPENMVLIEAKKIGVSVHVDTLKAETFAFTLKEVIEDKRYKSAAMTAKAIRRSHPLTPSQRLVGWIDHILQTGGGAHLKPHGFQQPWHVQHLLDVLLFLLGLTLATLWLLKKVLGLLLRPLCVAKEKKA

SEQ ID NO: 7146 - protein, 412 aa, Papilio machaon
MADKGFVSQHFNIDPSILLSLYSLRSVGTYESARILAMFPTPSISHQVVFRPLTQELAKRGHEVIVITPDPAYPKGQAPKNLTEIDVHDISYSKFKILMERIKDVARDVIKQVEVIIDSNNAVFEEQMKTESVQEILKYKDDYFDLILVEACMRPAIGLSYVFKAPIIQDLKSYLDSSKNGVIYFSLGTNVKPSNLPSDKLQVIINVFSRLPYDVLWKWDDEELPGRTKNIKISKWLPQSDLLRHPSIKLFVTQGGLQSTDEAITAGVPVIGIPMLGDQWFNAEKYVHFNIGHKLDIDTLTEEQFDNAIKSILNNNSYRENIVRLRSIMQDQPQSPLDRAVWWTEHVLRHGGARHLRGPAANISWAQYLELELVLTLAAILISSLIILFIVAKLIWNVLKVQLSAVIKVKKS

SEQ ID NO: 7147 - protein, 238 aa, Homo sapiens
MENFVQSSGEDGIVVFSLGSLFQNVTEEKANIIASALAQIPQKVLWRYKGKKPSTLGANTRLYDWIPQNDLLGHPKTKAFITHGGMNGIYEAIYHGVPMVGVPIFGDQLDNIAHMKAKGAAVEINFKTMTSEDLLRALRTVITDSSYKENAMRLSRIHHDQPVKPLDRAVFWIEFVMRHKGAKHLRSAAHDLTWFQHYSIDVIGFLLTCVATAIFLFTKCFLFSCQKFNKTRKIEKRE

SEQ ID NO: 7148 - protein, 533 aa, Ceratotherium simum
MAVGLQVPLLALAGLLLFLSVGPQAEGGKVLVVPMEGSHWLSMRKAVRELHARGHQAVVVSPEVNLHIKEEDFFTMKTYDIPYTQDEFNHILLGQSHMIFEKAHFLKTFWRSMTILKNVSLLFQKSCEVLMYDKDLIRHLNASSFDVVLTDPVYPCGAVLAEYLKIPAVFFLRALPCDLDSESTQCPNPSSYVPRLLTTNSDHMTFLQRVKNMLYPLALKYICHVSLSPYASLASKLLQRDVSLVDILGSASVWLFRDDFVLDYPRPIMPNMVFIGGINCANRKPLSQEFEAYINASGEHGIVVFSLGSMVSEIPEKKAMEIADALGRIPQTVLWRYTGTPPPNLSKNTILVKWLPQNDLLGHPKTRAFITHSGSHGIYEGICNGVPMVMMPLFGDQMDNAKRMETRGAGVSLNVLEMTSDDLANALKAVINDKRYKENIMRLSSIHKDRPVEPLDLAVFWVEFVMRHKGAPHLRPAAHDLTWYQYHSLDVIGFLLAVVLGVAFITYKSCVFGYQKCFGKKGQAKKSQKSKTH

SEQ ID NO: 7149 - protein, 448 aa, Toxocara canis
MFSEMLEPGIELSDDIENAQAIIPLEVGQYTLEQLGFLVWHLDFIPDGIEGGFLQGDLFFQHSTNSATFKRVSNTSWDLVIADEMFPNSAATISLNLKQNFNTRIALFSTTDFFNTHSTLKALARNPVISPNYYLRHDRISYDVRSFACRLVAFRDALIEQISIGLLGDRIIRRGARRIGLNNGFVELFSTASITFNDYFDKYRWPTTISNTLVFTTTPCDVPQHLPASIEEFISDPRSHGTIYIAFGSIVDWTVAPSNVIESFTEALNSLHDYRIIWSIGAKVTQGLKTHIKTVAWAPQSAILQDNRTKLFFTHGGLKSIKEAICAGVPMLTIPFIADQMKNSLLAYQAGIAEIIHKRRITSAILLKAMHKILQDNNYRQKIVSMRSIYNDRIMVPIQLETFWVERILRSKRSEIAFRIRATQMSWISYSGLDIVLIPICVVLLSTQ

SEQ ID NO: 7150 - protein, 394 aa, Trichoplusia ni
MIRAKVLIYICLYTAVTYVDSARILGVFSMPSISHQVVFRALTFELAKRGHELVVFTPNPVSPAEGIPNNITEIDTGAVYLEWRLIKSTLETDEKQNEFLKTRFGPNAPTVRELRNNVQMLFLNAHPIMGNNRPVPPSVVYLGGLHLKPPKPLPQDLQTYLDASIRGVIYVSFGTNVRPSNMDQDFLDAFLQAFESLPYDVLWKFDGDNLERIPKNLKIQKWFPQRDLLLHHNVKAFVTQGGLQSSDEAIDAGVPLIGIPMLADQWYNVNKYVELGIGVQINALTMTADDLTQAVEKIVSDTSYRQNIRRVRAIINDQPESPLERALWWTEHVLKHGGNHLRAPSANTTWSEHLMLDVVLLVLSIILVTGFLLIYASFKIWNLLKYKLEKVKLH

SEQ ID NO: 7151 - protein, 528 aa, Ceratosolen solmsi
MTPSLVTAASCAFLALCLCLDASYALRILGLFPLHGKSHFLMCEGLMRNLAKRGHQVDVYSHFPLREPVANYTDYDLGGRIGILSNNVSYGSFDSRTNFAFMPLLMRLYGMPICELMDLPVFQKLMRDPPNDPAYDIVVIELFVAHCYLAWGHRLQVPVVTIITSTMYDWMNYPIGNPSNAAIEPSAFSSFNSPMTFPERLQNVLIKMYIVWTFDNYMSKQDKKVKELFGPDYPDIRDMQQDISLVLLNYHHSITGVRTFATSVQPVAGLHIEDTKDKLPKEVQKFLDQSSHGFIYFSFGSMMRIETFPKHVLEMFYTTFEKIAPVRVLIKVAKPEELPPGLPSNVLTQPWLSQIKVLQHKNIKAFITHGGLLGTQESIYYGVPMIGIPLFADQYFNIQSYAIKNIAVKIDIESITEECLTKAVMEVLHNPIYKQTVDKIGRIFKDDLVKPVDKASFLIEYVVRHGKDTLKSPILALSWWQRILLDVYGFIALIILITLYVIWLGLKMLSKAVWKIITAHSFSKLKEN

SEQ ID NO: 7152 - protein, 527 aa, Oryzias latipes
MGVRGWFPTAGLLAWLCCLSLGPVQGGKVLVMPVDGSHWLSMKILVKELSRRGHEVTVLVPESSLLIKGSKDYKTEVHKVPFTQEELNGKFDKLRESVFVKTPEFTDMFVNVQRLVEFTTLQVKGCESLLDSEDLMERLRGEGFDAMLTDPFLPCGSILAKMFSIPAVYFLRGLPCELDYKANQCPSPPSFVPVFYSGSTDKMNFLQRVKNFFMYNVQSYVCTVLYQHFDDLVSRRIESGMSYKDLLSHGAIWLFRYDFTFEWPRPLMPNMVLIGGINCAKKAPLPTDLQEFVDGSGDDGFIVFTLGSMVSTMPAEKAKQFFDAFRQIPQRVLWRYTGELPEDMPKNVKVMSWLPQNDLLAHPKIKVFITHGGTHGIYEGICNGVPMLMFPLFGDQGDNVHRLVARGVAEKLSMLDVTTETLLAALKKLIYDKSYKERMATLSSIHLDRPIEPLELATFWTEFVMRHKGATHLRVAAHDLNWFQYHSLDVIGVLAIVVITVLWVTLKCCSFGVRKCCGRRSSKKKSE

SEQ ID NO: 7153 - protein, 729 aa, Operophtera brumata
RSSHLETTMLLLLTISPSRKCPICSKYLSNGAHCDIDMEENLKSVPASPFVNFYRAYDMAKAFKIMGNDNCNRIMTNDEIRKIITSGDKYDLVIVEQFVTDCGLAVAYKVNAPTVGMTAHVLMPWTYSRLGAPNKPAFVPNHLFATGTKPHLWTKVQSAIINLAMNAYFTYAIQRSDQAIVNKIYPEVPDLESLGHNISLVMLNQYFPLTGSRLYGANVIKVGGMHVTQDNEIIDKELKSFLDMAKNSVVYISIGTVASNFPSDTLEEIMAFVQNSKMNFVWKVDDIKDNVAKNLLSRQWLPQTAILCHPNVVVAFISRSGMLSTTAAMHCGVPIVGVPLFGDQFSNADSAAANGLGVVLDIYTLNRKELASRNHDVTVINYFPFKNMTNIRQISIQDESGAYCDINIEENLKSIPAANHFVNFHRAYNMATRLKSMGNDNCQRIMTKKETREMITAGDKYDLVIVEQFVTDCGLAIAYKLNAPTVGITAHILMPWTYPRLGAPNNRSFVLSHDLATGTKSSLWRKIENAIINLAMNAYFTYAIQRSDQAIVNKIYPEVPDLESLGHNISLVMLNQYFPLTGSRLYGANVIEVGGHPNVVAFISHSGMLSTTEAMHCGIPIVGVPLFGDQFSNADSAAANGLGVVLDIYTLNRKVLEEALQTVLQDSFQQRAKELSVLWRDRPVSAMDTAVFWIEYVARHQGRINLKPATGYLDMTEHLMWDDTVPLEC

SEQ ID NO: 7154 - protein, 450 aa, Trichinella spiralis
MQIHITLYVFICLTYGFISELFAKDFRGNVLHFACGISKSHVLFNERLANVLSENGYKVHIVFAPVTPGVDLPDFRNNKNVEVIKINFTITENVFTLGKQWQNDRLLIDSCKILSENSALKQHIETVQYDVLLNYCLDICPLAFGWKGKIPKTICISPSTVIFESVASIVGTPIRPSFIPNGGSAYSDKMTFFDRLKNSLLSSLMLLYPQLPVSAHKTEESIFRTIYGNDFKSITELNSNIVGMLINGEASLEFPRPLLPTVLYLGDLLPPKSSRLSTKELLDAFSRFPNYTVVCKLSVDESQKHYLPPNVKLFDWIPQRELLDHPKLKLFITHAGYNSLLETAKVGVPMITIPLFGDQLSNALRAERQKLSLVLSKLEITSENLENKMKIILENETYFNRAKQFAGFIHDKPLSNADMLIRYMDITIRRQQLVRSAVLNLNNIQLIVAE

SEQ ID NO: 7155 - protein, 516 aa, Acyrthosiphon pisum
MSCPIIITILVLCGCSTIIFPADSARILAVELTGGRSHWNFMRSVLQSLIEKGHNLTIFSPFSDIEGCGVNCSLIDTSKDYPTTGSINIATVLKTLSSTVSLISQSVNITRNRCNAMYNNTDINKILMVRNNSDYEVLLIEPMATECASHLAGILQIPVVYLIPSPMLTFVEPILFGHTPNPAVVSHILSQHAVLRKFVQRCINSVLLAYSLISREYYEWIIKKNHPQSYDSIESVKPSLVFVNSHYITEPSRPVPPNLIPIGGIHLSQPKTIPKDILEFIENSPHGVIYFTFGSVVSMSTLPDHIQNAFKEAFAQVPLRVLWKYEGEMKDKPINVMTSKWFPQRDILMHPNVKLFISHGGISGVYEAVDAGVPVLGFPLFYDQPRNIDNLVEAGMGISMDLLTLQKDELLTNILELINNEKYMKNAKIVSDRFKDRPMSPAESVVYWTEYVIRHKGAPHLKSHAFNLTWYQYFLLDVIFVIFIFISFVIFIIYKLFKTIYYYFLKYSQTIKPKLQ

SEQ ID NO: 7156 - protein, 522 aa, Caenorhabditis brenneri
MRKLLLFSILPVFANCLNVLFYVSVIAQSHIPFHNTAIKVLLDRGHNVVRSCDSPLNEMVKIHFPAGIRQNYTFGYDDPHFWSKHALHLFNIFEKKQVPYAEFLAFDELTFQLCEKVVHDVDLLEYIKRGKYDIGLSSDYDPCANIIMHAGGVPVKASMIPTPMFQPQVYSAGLPSPASLYGTALYPKYDESFSSRLFHLIRHTYNIYFVTPKLMYRYNTLLQKTFGPTFPSVEEIERNVDLVLVNSNEIIEKPRPISHKIKYIGGMGKKKAKPLTEEYNNILDSAAKGVVLFSFGTQVPTKKVPIEIRRNFVAAFKKFPDFLFLWKYDNLTDDHEMFENVQNIHRVEWLPQTDLLGDDRVKAFISHVGLNSYLELAAAGVPVLSVPLFIDQHHNALNAAAREIGVTVEKDQLTVENLVNALQKLLFDPKYEKNAKMISKMMVEKPEQAEKLFVDWVEYAANNPGFHKIVNLPGAELTPFWYYCCDVILACFVFLTASLFIFWRLVNFLKCQILIRSKSKSE

SEQ ID NO: 7157 - protein, 523 aa, Spodoptera exigua
MSHFLIVLITSCVLFSNQSESARILAVFPIASISHQVVFRPITQELARRGHEVTVITPDPAFPKGETPQNLTEIDVHDITYDIWKEKFMTAPKGNKNDLYLHIQIYLDSILLMFDAQLKDENVRNAIEDKNKQFDLVLLEAAVRPGLIFSHIYNAPVIMISSYGASFDNFEIVGAPIHPLLYPIGIRQRLNNLSIWEKITELYLHYKSDEMASSNYALENDFLRKRFGPGIPKIEELNNNVHMIFLNIHPIFEGIRPVPPAVLFMGGLHQKPEKELPKDLKNYLDSSKNGVIYLSFGTNVDPKLLPPHFIQTLINALSKLPYDVLWKWNEDELPGRTENIKISKWLPQSDLLRHPKIKLFITQGGLQSTDEAITAGVPLIGIPMLGDQWFNVERYVYHKIGQGLDMETLTEEDLTNAIKTIIRDDSYRQNIIRLRSVIYDQPQPPLERAIWWTEYVLRHGGARHLRGPAANMSWAEYLELELILVIVSILLLAITIFMIASYYIFLCAKNKFYSNQSFSIIRY

SEQ ID NO: 7158 - protein, 731 aa, Agrilus planipennis
MNIPILLLVFLKFASCANILAHFITPSMSHQSVYRNIWKELSLRGHKITVITPYPLKDPLLVNLTEIDVNFSYEIIKEAINSKKLSQEQKIDAERLLNEIIPPVLDCQLEEPRVKEIYNGENNETYDLVLVEMIYPVVYPLAQKYRCPYVGIASFSGAKVFEIALGNPAHPVAYPDVLLEYSAVETFFQRLHSTFFDIRTYLRLARVTTLRTLLVVINIRNPHTRQLNVKNAFLIGELQEEIYMKQPLGVSKQSDLILASRNRSTIFVSVNLTGDKKIYLLIYDEKVLLQITRKLGQQCRMKDLGQPNFFLDIKIERDATALRNSNCNGINTPVKPKSPSETNSESIIEIRPYRELVGCRYLIRSTRPDLSAAINFYSRFQSNAAEAQWTGFKRILQYLQATRDCCLYYPKDNPEPLALGQLEDQEAANSPTLLYGGREMGFHFTKPVTIYEDKQACIHLIKRWDHRRLKHVDVKYNFTRDLHAKGEIEDLKKELDDAIQGVIYFSLGSNVKSVNLTSRLKGVIASALSELPYKVLWKWESDHFPGKPNNVVIRQWLPQEGVLAHPNVKLFITQGGLQSMEEALFYKVPLLGMPFFGDQPSNINKMVQMGIGLEINRNTVTKEEMKLKILELINTDKYRQKIAELSDIAFDQPMTGVEKAVWWIEYVIRHKGARHLRNPLLDMPLYQYLFLDIIALVLSVLAFAIFVIVFAIKYLLKFIKSWQNSTKIKSS

SEQ ID NO: 7159 - protein, 698 aa, Caenorhabditis remanei
MVILFLLFSIVFSNLNAINVLVYSPAFAASHTNFMARLADTLTEAGHNVTFLVPIVDVARRNQLGVRITTDVVVVEHDELASQESVPFDDSMEVYWTEKTDSSNVEESFKWFFDGMEVGCENLLRQKHIFDLMKSRNFDVAILEPLAVCGLGFFKKLGIEKTILASSCAYYDFLFRHLGEPNEYSYLPALMSTKGEKMSLMERFENYKVSEVQKVFQGMSRGMFKMFDKEQHFYRQYLGKEIPDWRELIPAASLYFTNSNPYLDFPRPVIQKTIPIGGVTVDMEKIKSTKLDSDWDTILSKRRLNLLISFGSMIHSSHMLTPARDNILRVIASQPDVTFIWKYETNDTSFAENLENVVFSQWVPQTALLADTRLSGFLTHGGLGSTNELAHLGKPAIVVPIFGDQYRNAHMLERHGCALIVEKTELDNWKLLKNSVKSILYDGKFKKNAMHLAELLRNQPLKPKELVVKYVEFVAKYGPFPEMDPYVRKLDFIQRNLLDVYLIEIIGHILFFSVIFLMTYLMPVIDIGKRDECIGVKLTKDLVIVEASEEMIARKKSESTSDEMMEAWWKSEMDSTNLRDTFRTNKDSFQMFKWFSSDMKIGCRNFHSRRDIFHQMKSRNFDVAILEPISVCGLGFVNALGIEKIILASSATFFDSVLNYIGEPLDFSYVPSLYSVTGEVMSMAERYENWVVLAFGTR

SEQ ID NO: 7160 - protein, 518 aa, Amyelois transitella
MAKTAYLLVAALALAHVCDAYKVLVMFPMVGKSHQILAGGVVRALLDAGHEVTQVTPFPDKNLPPNLRQVDISGSVDDQFVKMLNVTALLEKEVKMGLSSMKGFIEVMNKIVLSDVNMVKLMSDTTETFDVVIAEWMFCDTYAGLGPVFDSPLIWFSSIEPHWIILSLIDESVNPAYVPDSMSSNVPPFNFVNRVKELFYQAMGLVFKFLFIDSFQSEQYEKLLVPYIAKRGKPVYPFDVVKYNASLFLGNSHVSLGLATRLPQAYKPIGGYHIDPVVKPLPNDLKNILDNAKNGLIFFSMGSNLKSKDFPEVLKKEFLQIFGGLKQTVLWKFEEKIPNLPSNVHIVDWAPQQSILAHPNCIIFITHGGLLSTTEAVHFGKPIIGIPVFGDQFNNIDRAVKKGFALRVDLAYDMKEHLRDAIELLLHDKRFTETAKELSLIYHDRPVHPRKELVHWVEHVVKTRGAPHLRSPALDVHLYQKLYLDLLALVLAVLYVLKKIIVKLCCSRKKVDKKVKKN

SEQ ID NO: 7161 - protein, 520 aa, Amyelois transitella
MIRIIVFLVCALSIDAARILFVIPTPSISHQLPIRPLTLELAKRGHNVVVITTDPIYPKGSAPVNFTEIDLHEISYKIWREKVLIATTSKGSSDDLEHQITLMYNLLTDIFEVQMETAEVKTLIKDKTKKFDLIFLEALSRPALLFSHIYKVPVILISSFLSMYNNLDVLGAPSHRILYPEITRQKINNISQWEKAKEMYMQHKLEKIINDAEVKQNAVIKKVLGRDAPTIDMLYNNVDMLFLNSHPIWDSNRPVPPSVVYLGGIHKNPRKDLPKDLKAYLDSSKHGVIYISYGTNVSPSALPAEKIQMLARVFSRLPYDVLWKWDKDDLPGKPKNVRISKWLPQSDLLRHPKLKVFITQGGLQSTDEAIDAGVPLIGMPMLGDQWFNVENYVKHGIGVRLDMDTLTEEKFQNAIEKVINDQSYRQNIIKLRDLINDQPQSPLERAVWWTEHILRHGGGRHLRSPAANISWTQYYEVELIAYLLAGLLLVLVIFATVIIYTVRFVSQIINSNSKLKSKEL

SEQ ID NO: 7162 - protein, 533 aa, Ailuropoda melanoleuca
MAAGSRGPRPLVLGLLLCALSPTVSHGGKLLLVPVDGSHWLGMLGVIRQLHQRGHDIVVLAPEASVHIKEAAFYSLKRYPVPFRREHVEATFIRLGHGVFENEPLLQRVVKTYKRVKEDSALILSACSHLLHNKELMASLVESSFDAVLTDPFLPCGPIVALYLALPAVFFLNALPCGLDSQGTQCPSPPSYVPRPLSLNSDDMTFLQRVKNMVIFLSENFLCNVVYLPYGPLASEILQKDVTVQDLLGSGSVWLLRSDFVKDYARPIMPNMVFVGGINCASKKPLSQEFEAYVNASGEHGIVVFSLGSMVSEIPEKKAMEIADALGKIPQTVLWRYTGTPPPNLAKNTRLVKWLPQNDLLGHPKTRAFITHSGSHGIYEGICNGVPMVMLPLFGDQMDNAKRMETRGAGVTLNVLEMTSEDLANALKTVINDKSYKENIMRLSSLHKDRPIEPLDLAVFWVEFVMRHKGAPHLRPAAHDLTWYQYHSLDVIGFLLAVVLGAVFIAYKCCVLGCRKCFGKKGRVKKSHKSKAH

SEQ ID NO: 7163 - protein, 256 aa, Diuraphis noxia
  MOD_RES (52)..(52): Any amino acid
  MOD_RES (143)..(143): Any amino acid
TPNVVYVGGIHLKPAKTIPKDILDFIEDSPQGVIFLTFGSTIKVSSFPEHIXKSFKEALADIPQRVLWKYEGEMKDKPKNVMTRKWFPQREILLHPKVKLFISHGGMSGVYEAVDGGVPVLGIPVFYDQPRNIEHLVLAGMAXSMDLLSTTREKLSNAISELINDERYAKNAKIASDRFKDRPMTPQQTVVYWTEYVIRHKGAPHLRSHALNLTWYQYILLDVMAVVLVFVFLVTFVLFKVFKCIKGFRNDKVKTQ

SEQ ID NO: 7164 - protein, 530 aa, Mesocricetus auratus
MALAGSPASLPLCVCLLLASDFVQAGRLLVVPMDGSHWLTMKMVVEKLVNKGHEVVVVVPEVSWQLGKSMNLTVKTYSISHTLEDLNREFKYFSDTQWKTPEQSMLSLMTGTAKGFFEIIFSHCRDLFNDKKLVEHLRQSSFDAVFLDPFDVCGLTVAKYLSLPSVIFARGVFCHYIEEGAKCPSPLSYVPRILLKFTDTMTFTERVWNHISYMLEHAICPYFFKTASEIASEVLQTPVTMEDLFNQVSIWLLRTDFVLDFPKPVMPNMVFVGGMNCQQRKPISQEFEAYVNASGEHGIVIFSLGSMVSEIPEKKAMEIAEALGRIPQTVLWRYTGPKPSNLAKNTILVKWLPQNDLLGHPKTRAFITHSGSHGIYEGICNGVPMVMMPLFGDQMDNAKRMETRGAGVSLNVLEMTVDDLENALKKVINDKSYKENIMRLSRLHKDRPIEPLDLAVFWVEYVMRHKGAPHLRPAAHDLTWYQYHSLDVIGFLLAIVLTVVFIVFKCCAYGFRKCFGKKGRVKKSHKSKTH

SEQ ID NO: 7165 - protein, 527 aa, Peromyscus maniculatus
MAMGLQVSLLLLLCALPWAEGGKVLVIPVEGSHWLSMRTIVRELHARGHETVVLAPDASVYIKAEDFFTLKTYAVPYTKEEYAHHLLSLLQMFFEIEYSVMMVLNNMELMKNVSTFYQRTCTSLLYNKGLVQHLNSSSFEVVLTDPANLCGALVAKYLNIPAVFLLRFIPSEVDFEAAQCPSPPSYVPRLFTSNSDHMSFLERVKNVLYPLPFKIIFRSSFAFYESLASELLQREVSLMEILSHASIWLFRFDFVFDYPRPIMPNMFFIGGMNCVLRKPLSQEFEAYVNASGEHGIVVFSLGSMVSEIPEKKAMEIAEALGRIPQTVLWRYTGPRPSNLAKNTILVKWLPQNDLLGHPKARAFITHSGSHGIYEGICNGVPMVMMPLFGDQMDNAKRMETRGAGVSLNVLEMTADDLENALKAVINDKSYKENIMRLSRLHKDRPIEPLDLAVFWVEYVMRNKGAPHLRPAAHDLTWYQYHSLDVIGFLLAIVLTVVFTVFKCCAYGCRKCFGKKGRVKKSHKSKTH

SEQ ID NO: 7166 - protein, 577 aa, Rousettus aegyptiacus
MRSCTPYLVLLCGAVGMARAAKIVIVPPIMFESHMYIFRTLAEALHERGHRAVFLLSEGRDLAPSPSYGLHRYPGVFNSSASDAFLQAKMRSIFSGRPTALELLDILDHYARNCDMMLADRGLVRALLRERFDLLLVDPNDMCGFVMAHVLGVQYAVFSTGLWYPAEVGAPAPLAYVPEFNSLLTDRMSLLQRMKNAGVYLVSRLGVSLLVLPKYEHIMRKHRLLPATSMPDLVQGSSLWLLCTDVALEFPRPTLPNVVYVGGILTKPAGPLPQDLQSWVDDADEHGFVLVSFGAGVKYLSEDIATKLAGALRRLPQKVIWRFSGTKPKNLGNNTKLMEWLPQNDLLGHSRIKAFLSHGGLNSIFEAMYHGVPVVGLPLFGDHYDTMTRVQAKGMGILLEWKVVTEDTLHAALVKVIGDPSYRQSARTLSEIHRDQPGHPVNRTMYWLEYVLRHRGAPHLRAAVHELSFCQYFLLDVAAVLALGAAALHLLLSRGAALARRTLRGWWSARGHSAANGHPHNGVLNGRCHGGRPAKHVKKAHVLVAVPHARLHRAMGISVQPPRDSGHWTLRPPLLRL

SEQ ID NO: 7167 - protein, 515 aa, Halyomorpha halys
MKIWMLSLLLVAHAEAARILGFFPLASKSHHYFFRPIMEALGKRGHEVVYYTGYPMKAVPPGVVQVDISGDLPDVHSTINVMDFVDTGVIYNVKNLFGFSLYMASFVMESPAVQKLVQSDEKFDAVLIESYFVQEYLSAFIHKFNAVGIDIMSLGDSAWANELTGLSDNPSYQIGFIAELTQNLNFWQRVYNTYVYAVTTIGGYYYMNEMEKLVDKYFTYTGHESRPSFMQMVSNRSLILTNYHNIVGYPGPKPPHRKDVAGVHITPGKPLPKKIQKFMDDAESGVIYFSLGSNVNVSHPANRKLVEVFMKVFEEVPQKVLMKYELATYEGNLPENVHLEKWYPQPDVLAHNNTVLFITHGGYLSLVEAVNFGVPVIGIPFFGDQGKNFRFVEEVGIGKMLRLADINYDNVSRMVKEVLSNRTYKEKMIKRSKIFRDRPVKPLDEAVFWIEHVIKYPEVLKPKALSLSYIQLHLIDVTLFVIGVFLAVMFIMWKSITIFVRILKRKSTPKKEKRS

SEQ ID NO: 7168 - protein, 520 aa, Leptinotarsa decemlineata
MLYRTALLFIIFSSLDHAESARILVSIFSPSFSHNVVFRPIWKELAKRGHDITLLTTDPMRDPKLKNIREIDLSGSYEIMEKYKASELLTKGKNEGKNTVKLIVDYLNALDHTADWQLEQPEVKQLIQNTSEYFDLVIVEVMNPIQMAFAERFKVPFIGITPVDAPYRIHAALGNYMHPSVYPDYFLPLIPPLSLLQRIVSCGVNWANWFLQYYTRYPAEDLIVRKHFGEGLRDLSEIEKDMSLLFIYVNPVFYQMRPVGTNTIVIGGGMHVNKPKPLPKELREFIESNENGAIYFSLGTNVKSSLMTDNMKSVIISSLGNLPYNVLWKFEDDSIQSLPKNVKIVKWAPQQDVLGHPNIKLFITQCGLMSIDEAIYNHVPMVGMPFMGDQGYNAVILEKKRLGKRVDRMNLTEEDFTKSIIEVIKNPIYKKNVVEMDMLTKDVQTTGLEKAVWWTEYCIRTNGAKHLRSPVIDTPTYQFYYLDVIGICLTVLASAIAIGLIAIRFLLGLLCRRDSKKKTE

SEQ ID NO: 7169 - protein, 214 aa, Ostrinia furnacalis
MIDAVSKLPHNVIWKWNQDELPGTISKIRISKWFPQSDLLRHTKVKMFITQGGLQSADVAITDAGVPLIGIPMLGDQWFNVEQYEYHNIGIKIDMDIISEEKQRNGIETVMKDKSHPKIKLFITQGGLQSTDETITDVSTAAGKPVRCRMFPWCRFRAVCAFQHPPCMDQAACERRGCMYEHKTLPAQSAPPAQAPSPMDVTSSIDVASPMDVA

SEQ ID NO: 7170 - protein, 526 aa, Acromyrmex echinatior
MSLSVFFVILAFDQIATSYRILGLFPLNGKSHWNMQEVLMKELARRGHQVDVVSHFPLKKPVPNYKDISIKGTLPEVTNNMTATQALSFSTPSMATLIQLVGTTSCNLFSYPKIQELIKNPPQDPPYDLVILELFAAPCYMAFGRHLKVPMVATVASVFHDWLSEMSANPMNPSYIPHMFSGYSQHMNFKERLTNFLVIHYLSWQFHYYTNAEQLKLINEHFGMNLQHITDLYNDVSLYLVNSHNSLNGIRPMTTNVIEVGGLHLSDEGDPLSPEVQKWLDESKDGCIYFSFGSMVRIETFSKELLQQIYASFEKIAPVRVLMKIVKKEELLPGLPKNVMTQSWFPQIAVLKHKNTRAFITHGGLHSTQETIYCGVPMIGIPLFGDQRVNIKNYVNKKVAISLNSINNVTEENLTLAINNILKDSSYRENIQKLSKLFLDRPMKPLDTAIFWVEYVTKFRNVLQSPGIKLNWWQRNLVDIYVFIFTVISIVFYIALFILRKLMKLLFGSRTCAKKDNAAMKLKKNK

SEQ ID NO: 7171 - protein, 261 aa, Ancylostoma ceylanicum
MVNSNELYELPRPTLAKVINIGGIGVEYKDAKPLEGEFKKIAESGKGIVVMSFGSVAHAELMPEHWKTAFLKAFAHFPDYEIVIRYGSDDLKDRLPPNVHAHRWLPQADLLLHPNTKVFISHGGYNSLQESINSGVPLVTIALFGDQFKNSKIAAKHGFAVNLKKGTLDEASIVAALKEVLNNEKYSLNAKRLSLMVRKKPVSPTHLLVKWTEFLAEFQTLENLTPAGNSLNFFQYFSLDVIGALLLVVQKGEERMTWFMR

SEQ ID NO: 7172 - protein, 533 aa, Vicugna pacos
MTTGSWGPRPLVLGLLLWALGPTMSQGGKLLVVPVDGSHWLSLVSVIRELQQRGHDIVVIAPDASTHIKEGASYTLRKYPVPFQREELEKIFITLGRNVFENDPFLQRVIKMYQKVKEDSALLLSACSHLLHNKELMAFLAASNFDAVLTDPFLPCGPIVAQYLALPAVFFLNGLPCSLDSLGTQCPNPPSYVPRPLSSNPDHMTFLQRVKNMLVALSENFLCSVVYSPYASLASEVLQKDVTVQDLLKSGSIWLLRKDFVFDFPRPIMPNIVFIGGINCASKTPLSQDFEAYVNASGEHGIVVFSLGSMVSEIPEHKAMEIADALGKIPQTVLWRYTGTPPPNLAKNTKLVKWLPQNDLLGHPKTRAFITHSGSHGVYEGICNGVPMVMLPLFGDQMDNAKRMETRGAGVTLNVLEMTSEDLEKALKTVINDKSYKENIMRLSSLHKDRPVEPLDLAVFWVEFVMRHKGAPHLRPAAHDLTWYQYHSLDVTGFLLAVVLTVVFIAFKSCVFAYRKCFGKKGRAKKTHKSKAH

SEQ ID NO: 7173 - protein, 368 aa, Caenorhabditis remanei
MDYLEIKAFALAHTVAFEASSMRVLGESVMPSHVPDLLTPSSDRMSLYERLLNSAIQTLHSYYRLTPEYYTSYSNPEERIYPLERLPDASFVFTNSNPYLDFPRATIAKNIQIGGISVSMETRKLGEEWDQILNLRNKNFLIAFGSVILSKDMPFESKVSLARAMKQFPDVKFIWKYEDSDTDKFAEGIQNIHFTKWVPQRELLADARLSAFMTHGGLGSVNEVSYMGKSSIMCPIMGDQMRNTKMLVRHNGSIEISKYDLGNSELVEKVIRKILYDESYKIAAQLLSDHLMNQPVSPKDLFLKHTEFAARFGKLPSLDPYSRQMGFMEYFMIDLVLIVTVIVVVLCLLLYFLLKLVYRISGKRMKVE

SEQ ID NO: 7174 - protein, 533 aa, Lipotes vexillifer
MTAGSQGPCPLILGLLLCALGPALTQGGKLLVVPIDGSRWLSLVRIVQQLQHKGHDIVVLAPDASMYIKEGAFYTLKRYPVPFRREDLEVAFINLGRSVFENDPFLQRMVKRYKKIKDDSALLFSACSHLLHNEELMSSLAEGSFDAVLTDPFLPCGPIVAQYLAVPAVFFLNGLPCSLDFQGTQCPNPPSYVPRPLSFNSDRMTFLQRVKNILIALSESFLCNVVYSPYAPLASEVLQKDVTLQDLMSYASIWLLRSDFVNNYPRPIMPNTVFIGGINCASKKPLSEEFEAYVNASGEHGIVVFSLGSMVSEIPEEKATEIADALGKIPQTVLWRYTGTPPPNLAKNTKLVKWLPQNDLLGHPKTRAFITHSGSHSVYEGICNGVPMVMMPLFGDQMDNAKRMETRGAGVTLDILKMSSEDLEYALKTVISDKSYKENIMRLSSLHKDRPMEPLDLAVFWVEFVMRHKGAPHLRPAAHDLTWYQYYSLDVIGFLLAVVLTVIFITFKGCAFAFRKCFGKKERVKKSHKSKAH

SEQ ID NO: 7175 - protein, 531 aa, Equus asinus
MAPAVLTGFLPLCVCLLLTPGFADAGRLLVVPMDGSHWFTMRSVVEKLIHRGHEVVVVVPEVNWQLGKLFNVTVKTYSTSYTLEDLNHQFRIFSKAQWKARVQSLLSLLMISSGSSFFEYFFSHCRSLFNDAKLVKYLEENSFDAVFLDPFDMCGLIVAKYFSLPSVVFTRAPFCHHLEVGSQCPGAPSYVSRFLSGFSDAMSFTERVWNHILYLEEYLFCRYLIRTVLEFASEIFQKTVTEYDLFSHTSIWLLRTDFVFDYPKPVMPNVIFIGGINCHQGKPLTKEFEAYVNASGEHGIVVFSLGSMVSEIPEKKAMEIADALGKIPQTVLWRYTGTPPPNLSKNTILVKWLPQNDLLGHPKTRAFITHSGSHGVYEGICNGVPMVMMPLFGDQMDNAKRMETRGAGVSLNILEMTSDDLANALKTVINDKSYKENIMRLSSLHKDRPVEPLDLAVFWVEFVMRHKGAPHLRPAAHDLTWYQYHSLDVIGFLLAVVLGVAFIIYKSCAFGFRKFFGKKGRVKKSHKSKTQ

SEQ ID NO: 7176 - protein, 521 aa, Spodoptera litura
MSHFLIALIASCVLILNQSEAARILGVFPVASISHQVVFRPITQELVRRGHTVTVITPDPAFPKGETPQNLTEIDVHDISYDVWNEKFMSISKGKKSDLYQHIERYLESIVYMFDAQLQDKNVRNLIEDKSKQFDLILLESSARLGLIFSHIYKAPVIMISSYGGSFDNYDVVGAPRHPFLYPICVRQRLHNLSLWEKITELYLHLRSEEMAASNYAKENAILRKHFGSNIPKIEELNNNVHMLFLNINPVFEGIRPVPPTVVFMGGLHQKPVKELPKDLKNYLDSSKNGVIYLSFGTNVDPTQLPSDFIQTLINALSKLPYDVLWKWNGDELPGRTENIRISKWLPQSDLLRHPKIKLFITQGGLQSTDEAIIAGVPLIGIPMLGDQWFNVEKYIYHKIGLGLDMETVTEEDLINAVKNIIHDESYRQNIIKLRNAMHDQPQSPLERAVWWTEHVLRHGGARHLRGPAANMSWAEYLELELVFTLLFTLLVVITILIVSLRFMLKALHQRVNQYIKLKQS

SEQ ID NO: 7177 - protein, 394 aa, Mus musculus
MDFLKNENFDLVLLDSMDLCSLLIVEKLGKRFVSFLPFQFSYMDFGLPSAPLSYAPVYGSGLTDQMDFWGRVKNFLMFLDFSMKQREILSQYDSTIQEHFVEGSQPVLSDLLLKAELWFVNSDFALDFARPLFPNTVYVGGLLDKPVQPIPQDLENFISQFGDSGFVLVALGSIVSMIQSKEIIKEMNSAFAHLPQGVLWTCKTSHWPKDVSLAPNVKIMDWLPQTDLLAHPSIRLFVTHGGMNSVMEAVHHGVPMVGIPFFFDQPENMVRVEAKNLGVSIQLQTLKAESFALTMKKIIEDKRYKSAAMASKIIRHSHPLTPAQRLLGWIDHILQTGGAAHLKPYAFQQPWHEQYMLDVFLFLLGLMLGTLWLSVKVLVAVTRYLSIATKVKEA

SEQ ID NO: 7178 - protein, 498 aa, Caenorhabditis briggsae
MADIIADHGHNVTLFQPFHIAMKNIEGLVKNENIEVGSKNNLKLTNKHFRSSTTIRTNTRKTETFPMFWDSHLMNNPILQAFMMPRYLVSQLQRTAVLLDELKSRNFDVIISESIELTGFHLAHLLDLPCIPTMSAVRFSIFNKLFGQPSAMGYVPHIGSNMAPEAGLFDRLNDIFRNVLMLNWMGRMADLQQTFIENGIGRPVPHWKDLIKQSPIYITNSNPYLDFAVPTTATIVHVGGITMDLKQMKHAGKLPKEYVPILNERESTVLISFGSVIRSFQMPDNFKAGLIKMFESLPDVSFIWKYEKDDAEFEKKLPKNVHLRNWVPQAALLADGRVKVFVTHGGLGSTMEVAYSGKPALTVPIFGDQPDNAMMLARHGGAIAYDKFDLQDGEKLTRTMKDMVENRKYQEKAQELLEILSNQPIDPKLNLMKHLEFAMQFPNLRSQVPAINHVGFVAHYYLDAIAFIAVFGMLSVYGSYRLIRKLPVRFLSKKAKDE

SEQ ID NO: 7179 - protein, 526 aa, Musca domestica
MRFWNGQLLLQLFIAIAGSLHSIHGYKFLGVLHFGSKSHFIVGSALLKGLAEKGHEVTVISPFSLKKPMKNYVEIPTPSVLKLMDEELNNLLDTTERSVVENLVSFHNTGVRVTEAVLNEPAVKQLMVSNQTFDAVICEVFLSEALYGLSEHFKAPLIGLGTFGAVAWNTDMVGSPSPPSYVANTFLPFTDHMTLGQRIINLAMLSFERLFLDFYYLPKQEEVFRRYFPDSSRSMYDIRKNAALVLLNTHVSLSFPRPYVPNQIEVGGMHINRKRTPLPVAIEKFINGSRHGVIYFSMGSNIKSANLPVEKRQAIMKALKSLKQRVLWKFEDPNLEGKPDNVYISDWFPQDDILAHENVKLFITHGGLLSTTESIYHGKPFIGIPIFGDQFLNMAKAVANGYGILLDYKNITAEALQQAIETMLGDPKYTILVRAMSERYRDQPMEPLTQAIYWVEHVARHKGAKYLHCAGLDLNFIEYHSIDAILILYGGLLFVVSVVLWLLKYLLGCLLRRVAGPKVTKKQKKH

SEQ ID NO: 7180 - protein, 518 aa, Neodiprion lecontei
MEFRTVLVFLIACCATDAARILGIFPYQGRSHNIMFEPLMVGLARAGHTVDVVSHFPPKESVPGFNHISLKGSLHFYVNNITVSFTQEVKGVHNVIRFISGREPSDLCNLMRLPQLQNILNTKTKYDVMVTEVFGTNCYLAVAHKLQIPVVGVTTGVMYSWGYSPFFGDGNPSFIPSQLGSFTNEMSFLERVENTIIHFYSIFLFNYYERTVSDPLARQYVEDMPPLTDLYNNMSLMLVNSHPSIHGVRPGSPAIVEVAGLHIDETQVLSKELEEFLNSSKDGVVYFSMGTMVRSDTFSSDRISAIYESFSETPNYNVLWKGNADHLPKPFPPNVKVVSWAPQYAVLRHPKVKAFITHGGLMGTEEAIHAGVPMIGIPFAADQTFNVVGYAHRGFAIHLDYKDLNKATFSKALSEVLTNPKYQSNAAYFSRLFKDRPRSPLDEAVFWIEYIVRNGGEPLKSSALHLNWFQYYLIDVILFLLTAAAFVVIVLFLLIRKVLGIFIGTTKPSTRQRKQKTK

SEQ ID NO: 7181 - protein, 528 aa, Cephus cinctus
MFARRWKVLLLTVLISRIALCEASRILGIFPFHGKSHAIMTNALMKGLARRGHQVHIISHYPSLEPMENYTIVVNLNGTIKGIVGQFSVAGVLDDKFQSNIAMTLGTLAGNDVCELLGTDVMQNFIKSLPNSEPYDLIITEVFGAHCYMGFGHLLKLPVVGVATCLEFSWMAEMIGNPVQPALYPDAYSHLRAPLNFWGRLQNTLSVPRSKYNFQKVTQVQTDLMRKYLSPDMPDIREVEKILSLLLVNTHHSQFEARPVVPALVEVAGLHVEDKESKSSPEVQKWLDESTEGLVYFTLGSLINIETFPNATLSAIYTCFSKIAPIRVLMKITNAESLPEGLPKNVKILPWLPQVQILKHPNTKAFITHGGLMSLQEAQYYGIPLVGIPLFADQYLNVVTYVDKKMAVSLYHNEITVESLGRALNAVLHDPSYWKAAKHESIKFRDRPMSAMDTSIYWIEYILRNGGDSLKARGANVPWWQIQLIDVYATILLALLTTIYLIYLVTKYVVSLVWNAVGEVKVSKKKSS

SEQ ID NO: 7182 - protein, 514 aa, Tribolium castaneum
MLFIYLFIIVPSVSITETANILGIMPFPVKSHSILFETLLKRLAEKGHEVDYVTHFLSEKTPERYNELSIRGSLPLFHNNFSVKALKDHSVYETIKFVTTSGGVDANSAIMKTAVLQSLKNTTKQYDLIITHLFGSDAMLGFGHLFNAPIVSITTCAVLPWAHGRIANPDNPSYVPNFYTSFLPKMNLYERIENTILWIMTRIWYNYLTMAPSNRLVKDFFGPDTPSLENLIQNTSLVLVNSHFSMQQVRPTVPNFIEVGGLHIREPQPLPKDLENLVSNNTFGVVYLSMGSMVITETFEPEILQAMFDAFAELPYTVLWKASPEKFPKGLTIPENIHFKTWMPQIDILCHPNVKLFISHGGLLGSQEAVYCAVPRIGIPLYGDQEANIHKSEKLGIAIKLAYGSITKDSFLETVKRVLEDLSYRHNVQKISQIFKDRPMSPLDTAVYWVEYVIKYKGAPHLRSVGADLPWYQYYLIDVAVILLFGLFVLFLLIVYILKLIMYFMYGKQKHKVE

SEQ ID NO: 7183 - protein, 526 aa, Danaus plexippus
MYDILAAGDRRCFAPPCRNTCSIHHIVRFKGIILDNTLVPKLTYMTPLLEESKLCDCFAEERGTEKKKFNAKKLYVFITNVYLMCALCRIEAANILGIFPVPSISHQVVFRKITQGLANRGHNVTVITPDPAYKNGEAPPNYHEIDVHDISYAVIRKFYKQKAHVFGDVMTFTDIRGSFEFMKEIFQAQLETEEVQKLISRKTKFDLILIESVIRLDYLNQEEENSFLKEIFGPQCPSLNEMNKNVDMLLLNIHPMWVDNQPVASNVIYMGGIHQLSEKKLPQELQKYLDSSKNGVIYVSFGTNVLSQVFPEDKLKIIINVVSRLPYDILWKWDKDELPIKASNIKLSKWLPQSDLLRHKNVKLFITQAGLQSTDEAITAGVPLVAIPMLGDQWFNAEKYEKFGIGIKLDVKTLTTDQLSKAIETVISDESYRHNISKLRGLMHDQPEPPLNRTMWWIEYVLRHGGAKHLRSAGANMSYWEYFETELILVILLGIFIIVAGISVVGFMLTHFISKFFTTTRKLKTN

SEQ ID NO: 7184 - protein, 321 aa, Caenorhabditis remanei
MKMKDKNTCDCHLLVKIDVMKVLQQRDVLEQLKNEDFDLAITEVVDGCAYAIFEHIQVRAHITVLSCSRFDHVSDVIGQPIAPSYVPSTQSFFNDKMNIKERFLNVVTFYFGRYTFANILDKEFEMAKEILGIKRSWRVSSRFSNKLFHFNLQETMPESSFIFSNHIPVLDFPAPTFDKIIPIGGFTVKMNEKILKLDDKWDEILNRRKKNVLISFGSNSKSKDMPEEYKQSFLRVFKSMPDTTFIWKYEDPSDNIAQGLENVYISSWLPQNELLADSRVTLFLTHGGLASVMELALMGKPSVMVPIFADQGRNAQMLKRH

SEQ ID NO: 7185 - protein, 522 aa, Solenopsis invicta
MRVLPLTITWLLYLSVCEGYRLLGIFPFQGKSHFTMIERLMKGLAKKGHQVDVVTKFPLKKPYPNYTDIVTLPLNVELVNKVTYEKMKSYLDVDTTYFVGIMGGNELCELLANPKIKELVQPKNPPYDAVIIEVFGAQCFGIIAHLLKIPMIGVSTTGTLYSWLPRIIGQPENLAFVSNIILGFTTPMNFWQRLCNVLRSFYDKWYFDYLTTRVQDRLIRENFGPDMPSVRELESKLSLILANSHITLNGIQPWTPAMVEVGGLHIHAEDETLQPELKKWMDDSKDGFIYFTFGSMVMIETFPREFLRVLYTSLAKIAPVRILMKVPAPEKLPPGLPKNIHISPWIPQLMILKHPKIKAFITHGGLMGTQEAISCGVPMIGIPLYADQFLNINTYVAKNIAIRLDVSTITEKSMDAALNAILQDPLYRDTARNLSRRFLDRPLNAIDTATYWIEYVIRYGENSLRSPAMDMTWWQLSLVDVIGFLLLCATIAIVGIVFIVKFMLKLMRKNNITLYSKKLKVN

SEQ ID NO: 7186 - protein, 533 aa, Dictyocaulus viviparus
MLLLLYSFLLLLQPLESSKSFKIVLFVPDIANSQVLFNTRVAETLSRAGHDVTMLMISSLDDLKSNDVKIMQNIKVHRINASYGLTKEEINEQEGGYMYQDVSILSSRFRQHMNTVTSLLVNTCQVLEDKEFLEWLQNQHFDLAFAHMYDVCPIGLIHYAKIPSWIWLNSGTLMDFVAHYMGVPKIPSYVSPILMESSDEMNFIERIKSFIGHILSVVIWRRVFPDRETAYFRELIDPSFPDIVDIAKQCPLVMVNSNELYELPRPTLSKIVNIGGLGMEMKDVKPLPDELQRIANDSSGLVVFSFGSVAPSHKMPLTWKNAFLDAFKRFPKYHFIMRYEGTDLFDKLPANVHILKWLPQTDLLAHKKTKAFISHGGYNSVQEAIIAGVPMITIPLFGDQPKNAKVAEKHKFTVNLRKSDINADNIVNALNKLLNDESYSQNVKRLSRMVEKKPVKAEHLLVSWAEFVAEFKTLKNLVPAGNELNFIQYHSLDVIAFLLIIITLIVYISSKFLIYTFNKVYYLAISFKKQKKA

SEQ ID NO: 7187 - protein, 526 aa, Trachymyrmex septentrionalis
MKMSLSVLFVILAFDQIASSYRILGLFPLNGKSHWMMQEALMKELARRGHQVDVVSPFPQKKPIPNYKDISLKGSTPEVTNNMTATEALSFSTPSIALLVEIIGFRTCALFNHPKIQELIKNPPQDPPYDIVILEMFAAPCYMAFGRHLKVPMVGTVASAFHDWLSEMSANPMNPSYIPSLFTEHNQDMNFKERLTNFLLMHYLSWEFHYYTNKQLKLVNEHFGMNLPHITDLYNDVSLYLVNSHHSLNGIRPMTTNVIEVGGLHLSDEGDPLSPEVQKWLDESKDGCIYFSFGSMVRIETFSKELLQEIYASFEKIAPVRVLMKIAKKEELLPGLPKNVMTQSWFPQIAVLKHKNIRAFITHGGLHSTQETIYCGVPMIGIPLFGDQGVNIKNYVNKKVAISLNSINNVTEEKLTSAINNILKDSSYRENVQKLSKLFLDRPMSALDTAIFWVEYVGKFGNVLQSPGIKLTWWQRNLVDIYAFIFIVIIIVLYIALFILRKLKKLLFGSRACAKNNAALKLKKNK

SEQ ID NO: 7188 - protein, 526 aa, Stomoxys calcitrans
MRFGYKQILRLFIVIVGFLHSSHAYHFLAVLHFSSKSHFIVGSALIKGLIDKGHEVTVISPFPQKKPIKNWHDVPVSGVLEFMKNETDDLLNTLERSVMENVVSFHKTGLQVTELVLKSPAVQKLMASNQTFDAVINEVFLSEALYGLSEHFKAPLIGLGTFGAISWNTDMVGSPSPPSYVPSTLLPFTDRMTLGQRIGNLALLTFERLLLDLYYLPKQEKIFRQHFPHSQRSMLEIRKNAALVLLNSHVSLSFPRPYVPNQIEVGGMHINRQRKPLPLDIERFISESPHGVVYFSMGSNIKSKNLPFEKRQELMKALKSLKQRVLWKFEDPHLEGKPDNVYISDWFPQDDILAHDNVKVFITHGGLLSTTESIYHGKPFIGIPIFGDQFLNMAKAEANGYGIMLDYKNLSANALKQAVEKMVYNKEYTNLVKAMSARYKDQPMAPLQKAVYWVEHVARHKGAKYLHCAGLDLNFIQYHNIDAILILYGGILFVLFVVLWLLKCLLGCVFGNKSQSGKTAKKMKKQ

SEQ ID NO: 7189 - protein, 521 aa, Diaphorina citri
MNHFPFIVLLSFSFLGTLSCDKILVFLPLPIWSHQMQYEKVWTALAERGHEVTIYTKFTPKSNSTNLKHVPIRLPKIDARMKEFNPAILTSSVNEILAMLFLWDFGYEGQVEAFQSPEFKKLMASKDQYDLVITESFFAMESSVALGHRFNAPNIVICSFGIAMNSLNFFGSPNLPSFMADFRTKYTNEMTFFQRFYNFYVFFVTRIMEYVYYYPKHQALVDTYFGKDYPSLYTMLSNVSLSFMYTNLAMSAAVPLVPNLIPVGGIHLNKPGKLPQDLQQRADAAKGGFVYMSFGSVVDPTKLSEETKLGFLEVFKQLKLPIFWKIDITNDPVLNAKTLPDNVFIQKWYPQTDILAHPNLRLFITHGGISSLMEASSLGVPVLGVPFFGDQYRNMVLLRHRGYALIEPIQTLTKQSFLKNAQTMLNDPSFKQNAKKWASIANDEIVSPLERVVYWTEYVLRHKGAPHLSASSRQLTWYQMYCIDIILVILGILYAVAKLLSMCCCRSSKKHTQVSSTKKKN

SEQ ID NO: 7190 - protein, 517 aa, Apis dorsata
MKFLFAIITIACAMYDDASGARILMMTPHQAKSHYIVYEALLKRLAERGHQVVSFNHFPQKTVLPNFTDVDISSSMPHVVGTKSIKIAFQQTMLQKLGSISRISLPTCQSVLEHPELKKFLHSKEKFDVYIMEIFLSDCFIGIGHALKIPIVVGISSTMPYPWTNGILRNPENPSYIPNLLSNFSDEMNFFERAANVMYFFISKLAYRYLADRPGYEIAKKHFGDDLPDLDMLRSRISLILTNGHRAVNTPRALAPGLKELGGMHIPASGPPPLPKDLKDFLDSSENGVIYFSLGSQINISTMPNEMLMSFYEAFERVPQRILWKCTESNMPKLPKKVKSIEWAPQLSILCHPNVRLFISHGGMLSSQEAVYCGVPILGIPLYGDQHLNLAYFMKRGFALKLDYYQLSYEPTISNALNELLLNKSYKDMARKASFEFRDRLIPPLDEGVYWIEYLLRHGPDSLRTTATNLTWYQYLLLDVILAIIISIALTVFIVYKLFKLLIWNERMTIDVNKKRS

SEQ ID NO: 7191 - protein, 526 aa, Pelodiscus sinensis
MYSFTAVLLLVVSSMRLAGGGKLLVIPMDGSHWLSMRAVLDELRQKGHEITVVAPEINLFMGTSESYTMRTYSVPFTKEELDGKFLAFTETIFKEQPFPLRIIQILENAKKTSALLFTTCTHLLYNSGLMPYLKESNFDAVFTDPMLPCGQIIALHLSVPSIFFLRGIPCGVDLEAAQCPNPPSYVPRMLSSNADHMTFTQRVTNLLISSSESFLCNIVYSQFESLASDFLQRPMTMKELFSHGSIWLKRVDFVFEYPMPVMPNMVFIGGINCKEKKPLSQEFESIVNASGEHGFVVFSLGSMVSEIPMKKAQQFAEAFGTIPQTILWRYTGQPPPNLANNTKLIKWLPQNDLLAHPKARAFITHGGSHGIYEGICNGVPMVLMPLFGDQMDNAKRIESRGAGVTLNVLDMTSKDLSAALNTVIYDKSYKENIMRLSALHLDRPIHPLDLAVHWIEFVMRHKGAPHLRPAAHDLNWIQYHSLDVIAFLLAVVLVAMFISWKCCLFCCRKCFCKKGRVSKSSKTKAQ

SEQ ID NO: 7192 - protein, 1052 aa, Nylanderia fulva
  MOD_RES (60)..(60): Any amino acid
MQMIKVMFLWLFYLSVCDGYRFLGLFPFHGKSHFVMCEQLMKGLARKGHQIDVISSFPLXKPYPNYNDIINITPPLKLVNNMSYEFMQILLAGMNPVHAVATLAGNDICGNLENPEIQKLVHNPPRDPPYDAILIEVFGAQCFAIFAHLWNVPLIGISTTSLYPWLPPIIAQPESLAFVPNNCLSFKLGHMNFWQRLYNTVHTVYSKLHFYYLTRPQNEIIWKNFGPDMPSVRELESKVALILINSHITLNGIQPRTPALVDVAGLHVQDESLTLQPDLEKWINNGKDGFVYFTFGSMVMIETFPRKILNILYTSLGKIAPVRVLMKVPKPEKLPPGLPENVYTSPWMPQIAIMKHPKIRAFITHGGLMGTQEAITYGVPMIGIPLFADQFMNIDAYVARNIAVRLDINKMTEKDMDAALHAVLWDPIYKDAARNLSEKFLDRPMNALDTAIYWIEYVIKYGSNVLRSPAMDLTWWQLSLVDVFVFLLLCIIIVIIVVIYIARFLLKLINGNNHSSLHSKKKINLKMQMLKVIFLWLFCLSTCHGYRLLGLFPYHSKSHFIMFEQLMKGLARKGHQVDVISPFPLKKPYPNYNDIVKLAPPMTLINNVSYEVMQVVLSTNPVHAISIMAGNDVCMYLENPAIQELTRNPPKDPPYDAVFMELFGAHCFGIFAHLWNIPLIGVSSATLYPWLPSIIAQPESLAFVPNNCVRLASPMNFWQRLYNMVHTLYNTLYFNYFTRAQNEIIRKNFGPDMPGVRELESKVALILINSHISLHGIQPMTPAAVDVGGLHVQDEGLTLQPDLEKWINDGKDGFVYFTFGSMVMIETFPREFLNIMYASLGKIAPVRVLMKVPRPEKLPPGLPKNVYTSSWMPQITIMKHPKIRAFITHGGLMGTQEAITYGVPMIGIPLFADQFINIDVVVARNSAVKLDLHKMTEKDMDAALNAVLWDPIYRESARNLSEKFLDRPMNALDTAIYWTEYIIKHGSDALRSPAMDLTWFQLYLIDVLIFLLFCIIIIIIVVIFIVRLLLKMSGNNHSSLYSKKGINHIKFK

SEQ ID NO: 7193 - protein, 511 aa, Papilio xuthus
MKLILAVCSVLVLLTCVEIKQVNSLNILGLFPFPGKSHFFVFEKYLRELANRGHNVTVISYFPQKDKVKNYHDISLANSTKILEDVFEVKKSYWSLLRLSFALVEWGTDNCRVMLSNKNVQNAWKTTKYDIVVTEQFNSDCSLGLAHHLNLPVIGLASHALMPWHYSRFGISFNPSYASHMFLNGGTKPTLYERIERVLFDSYLRLIYKFYCQRIDQNTLAEYFNDIPPLEELGRNIKFQLVYSYFVHFGSSLYPQNVIEVGGYHIQKPKKLPDDLIKFIEESQHGVIYISFGSMLRSATTPREKIETIISALKELPQRFIWKWEEDSLPGNPSNIYLSKWLPQNDILSHPNVLAFYSHSGLLGTSEALYHGVPMLAMPIFGDQPGNAAAVEESGLGVIIEFMELTKEELLEKFKQILNPEFRMKVKLLSQAWKDRPISSIDTAIHWTEFAARYPNFTFRSPAADVPLYQYLGLDIFLILFAIPLLFIVLFLLYIFKKKFNLTSGNKSKNE

SEQ ID NO: 7194 - protein, 280 aa, Ancylostoma ceylanicum
MVNSNDLYDIPRPTLAKVVNIGGVGMQLKDVKPLAPEFQRIVDKAAGIVVFSFGSVTPSEKMPSSWKLAFIDAFKRFPKYHFIWRYVGTDLQDKLPPNVHVFKWLPQSDLLQNPKIKAFITHGGYNSVQESISAGVPLIAIPLFGDQPKNAILAERHRFAVSLRKSDISADVIAKTLDRILTDHSFSRNAKRLSQMVRKQPVSAAHLIVSWAQFVAEFKTLDNLVPAGTKLNFVQYHSLDVIAFLLSVSIMILFVLWKLLKFIIVELCCLFYRNKKEKKE

SEQ ID NO: 7195 - protein, 1020 aa, Bicyclus anynana
MSIKLLSLLCYASVLTSIESARILAVFPFPSISHQVVFRKLTLGLANKGHDITVMTTDPAFPKGDAPSNFKEIDVKDISYKKWQTSFQDDYKVDKDFDTFSQMRRSIDVLGGILKIQFETPEMQEIITNTTRKFDLILVEALMHPAIVLSHILKAPLILVSSLGGIYKNHHIMGAPTHPLLYPSIFHRRLYKLTIWEKLIELYDHFLIDYAVYLNEADETAFIRQLFGPDIPTLNELYNNVDMLFLNINPIWADNRPVPPNVVYMGGIHQSPEKELPNDLKTYLDSSKHGVIYLSFGTNVLSGMIPTDKVQMIIKVLSNLPYNVLWKWDKDELPGKSNNIKISKWFPQSDLLKHPKVKLFITQAGLQSTDEAITAGVPLVAIPMLGDQWYNAEKYVKHGIGKQLDIDALTEELFKNAVETVITDESYRKNIIRLRQLMHDQPETPLDRAIWWAEYVIRHGGAKELRPPSANLSFVEYYEVELILIVVSYRIFIIIAVVNVLKMMLKLLSLILFVSKVSDSAKILAVFPVPSISHQVVFRPLIQELANRGHEVTVITPDPAFPKGSAPPNLKEIDVHDISYRTWRNSYMDNYKADGSSTNFNVVRQKWSLLAKIVEMQLHTPEIQDIINDKNKKYDLIFLEAMIRPALIYSYIFKAPVILISSLGAILSNQKVMGLHTHPILYSSPLQKRIYNLTLSEKLSELYTFYCIELADYYNEIDENALLKNVFGPSIPPLNELYNNIDMLFVNSHPIWVDNQPAPPTVIYIGGIHRIPEKELPKDIKTYLDSSKHGVIYLSFGTNALSTTIPHDKIRLIVKVLSELPYDVLWKWDKNELPEQSRNIKLSNWLPQSDLLRHPKVKLFITQAGLQSTYEAINGGVPLLAIPMLGDQWYNAEKYVKHGIGKKINIESLTATELQNTIETIIRDERYRKNILMLRDLLQDQPESSLDRAIWWTEYVIRHGGAKHLRPPSANISYAEYFQIDVIFILLLVVLICFGIIILSMFCILKNFKLRKDIRKFKCQ

SEQ ID NO: 7196 - protein, 497 aa, Pieris rapae
MRLNVVLALVILKCVLVCKVNSYNILGVFPFLGKSHFYVYQVYLQELAKRGHNVTVVSFFPQKQPLKNYHDIDLGKDNKYFEFRHPIIVSSFHKLLSLTILQPVMGPYTCRLILEDDEVQSLLRSKQKFDLLVMEQFNVDCPLSIAYKLNAPVVGMTSGLMLPWHYNRYGVPYNPSYVSYDIFNGVSKPTFLDRIVRTISYHYIKIMQRVCSMSEDRVIADFFDDVPLIEELSRKIKFLLLYQNFVVSGTQILPSNVIEVGGFHVAKAKRLPTDLKKFIEESKNGVIYISFGTILNGSSMPRRAFDAILGALKELPHRVVWKWEKEIPDNPDFIYVSKWMPQNDILAHPNVIAFFSHCGQLGTTEAVHHGVPIIGMPITADQFSNAAAIEEKGLGVQVDLNAITKELLLEKFKIILNPRFKSQVENISKMWHDRPVSAINTAIHWTEFAARYPNFTYTSPIIDIAIMEKIEKITEYKNKDVLTFTVFCMYLHSVSAV

SEQ ID NO: 7197 - protein, 1330 aa, Papilio machaon
MRCGIIFIVCIVLASRSAECARILGLFPHIGKSHYIVFQSLLQALADRGHDVTTVSFFPIKNPPPNYKDVSLEGVADLGVEVLDLSMFEFPSVLMKIPVFSLFLKAKVEINMLGEIGLGVCDQLVRLPTLAEAMKKEYDVILTENFVSDCMMGILHVYGNKAPVIGLSSSIFMAWVPDRYGLNDNPAYVPVITCPYSTRMNFLQRLGNFIVNVYSKYWFHEYLQKEEQAMIEKHFNTKIPDLEEIARNQSILMLVNSFPILNGAKPLVPSVIEVGGMHLNHTRKVLPPMVFEPLLKTLAERGHHVTTVSFFPLKNPPENYTDISLENISEVLLESLDLSLFESNGVISKIPVLRRVLGLMFEFQPLAHFALHVCENMIQWEPLANVLKKEYDVILLENFNSDCMLGLLHIYGNTAPKIALSSSNLMPWSAERIGLIDNPSYVPMVSTGFTSRMTYTERLENSFLSVFYKLWFYKSVQVKEQSLIEKRFSKAVPDLRDLSRNYTLTLVNTFHALNGVRPLLPALVEVGGMHLDHTLKPLTPYIEKFLNESEHGVILLSFGSLIKTSTIPKYKEDMIVNALAKLKQRVIWKFEGSGEEGTLTGNILRVKWLPQYELLQNKKVVAFIAHGGLLGMTEAISAGKPMVVVPFFGDQPANAAAAAAAGFATVVPYIELTEEKLTKALEFVLSAETRLNARRVSSIWRDRQADPLETAVYWTERVIRWGHHAQLHSPARDMPLYQIALLDVIATLVIAILIILAISWYILSKVFRLLFGRESRRRTPYVSRHMRLRQSIDRVAVIKVCVMRVYTFMIVLVALATHNAGDCARILGLFPHTGKSHFMVFEPLLRALAGRGHHVTTVSYFPLKSPPANYTDVVLEAAVQDGLSALDLSIFEKSNPLMKVPLLNTIIKNIFEIEMTVPLALATCESIIHQSSVIETLKQKYDVLIVENFNSDCMLGLTHVFGIEAPIVGISSSAILPWTYVRFGLPDNPSYIPLLTSPYTSNMTFMQRLDTFISKLYVNALYHMIQKRERDIIEKHFGVKIPDLEEIGKKQTSVLLVNTFHALNGVRPTLPAIIEVGGMHLDHSRKVLPSYIEKFLNKSEHGVVLLSFGSLLKTSTIPKYKEDMIVNALGKLKQQVIWKFEASGEEGTLTGNILRVKWLPQYELLKHKKIVAFITHGGLLGMTEAISAGKPMVVVPFFGDQPANAAAAAEAGFATTVPYNELTEERLTKALEFALSPEIQLNARRVSSIWHDRQAEPLETAVYWTERVIRWGHHAPLHSPARDMPLYQIALLDVIATLAVAILILLALSWYILSKVFRLFFGSGSKLKMN

SEQ ID NO: 7198 - protein, 521 aa, Spodoptera litura
MKIFIYLILCLSIFASHDEAARILAVFPNPSISHQVVFRPLTQELARRGHEVTVITTDPVFPEGKAPANLTEIDVHDISYDIWKKIFLASTKGNKDDVFMAMSAIVNALTAVVDVQLKDERVQNLIRDKSKQFDLLFLEACVRPALVFSHIYKIPVIQVSSFMATFDNYANIGAPIHPFLYPALTRQRLQNLTMIEKIKEFYNDFMLNRLYANNMEKENEMLRSHFKDIPPISELNNNVDMLFLNVNPMFEGIRPVPPSVVYLGGLHQVPHKPLPKDLQTYMDSSKNGVIYVSFGTNVDPTKLPADRIEVLVKTLSQLPYDVLWKWNGDVLPGRTDNIRIAKWLPQPDLLIHPKLKLFITQAGLQSTDEAITAGVPLVAIPMFGDQSFNAERYENFKIGKRLSMDSLTVEEFTNAINTVINDESYRENIVKLRTLIQDEPMSPLERAVWWTEHVLRHGGARHLRGPAANMSWAEYLELELVFTLLLGLLAIISVLFLILRSLYKIVFGSTVTSKPKKAKRS

SEQ ID NO: 7199 - protein, 1043 aa, Rhopalosiphum maidis
MFSSKMWPSSFFCSAVLCIAAFTTVTRAANILVFMPLPIKSHFRGFQPLFEELAHRGHNVTVASSFPLDRPIANYTDIGPFVNKDRERNVMDLIHMNFVTSVQVKWSLGVKLSETVMSNENMKRFMQQSSSYSFDLVMIETFCQEYTVAMGHKFNAPVINLAPAMLWVSVSKWLHVPSTFSYIPDVCLQTAGNMGFVERLKNTITGLMQSYVENYLYLPKMKEVMNTYFKYEGWEFRPPLEHMLNNVSLTLVNSNFAIGVARPYFPGIVEIGGMHIKNPKSLPENLQTFLDDADEGVIFFSFGTVVNLNDLPKEKLNIFLSVIQKLKQKVILKWIPNDSVQLSKNIMTGSWFPQNDILAHPNVRLFITHGGLHSIEETVSNAIPIVGVPFFADQYLNMKIVEQKGFGKLVNFFEMTEESFENAIKEVLLNVMFKEMAKIQSQVFKDQPMKPLDRAVYWVEYILRNGGAEHLKSDSLELNDVQYFLLDISLISLVLTGLIIWLCSLVVAQIISKNKIQHITIRVKMYFVVLAAVCRLTLPLLLLPAVLSPPTALAANILAFMPMPLKSHFGGFQPMFEELALRGHNVTVVSAFPLTGRRVPNYTDVDVMPPQGVPAFDVMHLVNSNFMISVTNRWFFANLLSNQMEHPNLKAFVRSEDNSFDLVIIESFLQEYTVAIGHKFNAPIVNLSPSMVWVSASKWLHLPATFSYVPDCCIGVTDDMSFVERIKNTIVGLMEMFVEDYLYIPMIKTLMSKHFSYAGWQSRPTLEKMLNNVSLTLMNAHHATGVCRPYPPGVVEVGGMHIKEPKPLPKGLQDYIDSASYGVIFFSFGSIVNLSNLPKEKLNSFLNVISRLKQKVIIKWVPDKSIKLPHNVMVGSWLPQNDILAHSNVKLFITHGGLHSIEEAVYNGKPVIGIPFFADQLSNMRLVEKNGYGRMITYDKLTEESFGKAVEEVLKNPTFKEKSMIQNQVYRDQPTKPLDRAVYWIEYVIRNDGAKYLKSDSLGLNTAQYFLFDVTLFLILLTAIITWLGYRGIVKVLSKCIAN

SEQ ID NO: 7200 - protein, 523 aa, Galleria mellonella
MWFKTPCVVLFLIYCNHAVHGASILALFSSLSFSDHLVYRGYISLLTQKGHSVAVMTPYPGNFQYPDTERIIELDVGQESAPFWDEYRRLMSNVDDYFPRLRALNELSLKIAIAQLKSKQMTALFINPNIKFDLVITEADVPLLYAVAEKYKVPHISITATNGKIHQYEAKGNPIHPILYPDVNTLNYKNLTRWQKIVEFYRHIQTKNEYYNNYLPLSEIAAKKILGLKRDLQEVEYDIDMLFIASNPILVGNRPTVPAIIFVDRMHIKPGVSLPQNIKSFLDSSTKGVVYFSLGVVQEAEQLATPILHTLAEAFRELPFTVLWKIGNTTMINKADNIIAQAWFPQQEILAHPNVKVFITQGGTRSLEEAIYYGVPIIGLPVVRSRKLFIKEVTKFGAGEVLDPYYLDKETFKSTISAVATNEKYKKAIVKLKDMIFDPVISGPESAVWWTEYVLRHKGARHFRSPAVGITFFKYYMLDLLSYLLAGCLFVLYLSFLILRYIYRRLRLRFATKPNLGTKYKAL

SEQ ID NO: 7201 - protein, 521 aa, Trichoplusia ni
MRVFVYILFLSLLFILNINEAARILVVVPTPSISHQVVFRVLTQELARRGHDVTFITTDPAFPKGGAPANLTEIDLHDLSYNLFTEEINKVPRGNKEDMITMFRAFFKFWPTVFGEQLKDASVQRLIKDKNQKFDLLILEAGIRQTLVFSHIFKAPVIQMSSFGGYLDNFPTIGAPTHLFLYPTVLLQKIHNLTMYEKIMEVYKHYTVDSLYYESRHLEDKVLREIVGPDVPSVTELANNVDMLFLNVNPVFVGIRPVPPTVVFTNGLHQIPPKELPKDLKSYLDSSKKGVIYISFGTNVDPTLLPAERIQVLVKAFSQLPYDVLWKWNGDELPGRTENIRISKWLPQSDLLRHPKIKVFVTQGGLQSTDEAITAGVPLIGIPMLGDQWFNVEKYLTHNIGVGLDLDDITVESFKNTLLKVIQDDSYRQSIVKLRRLMRDEFQSPLERAVWWTEYVLRHGGAKHLRSPAANISWAEYLELELVLTLLAGLLVVVSAFIFITYKLFKFISKKCLISVKVKSS

SEQ ID NO: 7202 - protein, 522 aa, Danaus plexippus
MANLHPVLFLIFLTKLSDSANILYVMPFSATSHYIMLKPIGTELARRGHNVTVITSIRDNNPPPNYHQILVNDTKIWDLLGIERPVVFSMVDLSTEELYNKIVWPGLIAFTELTFKSREFMTFLKKDNAFDLVISEQFYHEALYALAYKYNAPLALVTTFGNCMRHNYITRNPLQMATVTSELLVVEDPTSFWGRLRNLLFNVYDYTFWRYWYLEEQEKLVRKYLPELTGKVPSLYEMQKETALMLINSHFSYDTPAAILPNIVEIGGLHFTKSNLSLPEDLQKVLDEAQEGVVYVNFGSNVRSIELPVEKKNAFLNVFRQLKQTVLWKWEDDVLDDKPSNLFTRKWFPQKDILQHPNIKVFVSHGGLIGMQEAIINGVPVVGVPVFGDQFNNVLLAQEAGFGKLLRYHDINEKTLSAVLNEVLYNASYMETAKEVSRRFLDRPLSPMDTAIYWLEYVIRNKGAEYLKNPARNLSWIAYNMLDVYSFIAIILIVIMCVFIKSWFCIKASITFKQISKSKKQS

SEQ ID NO: 7203 - protein, 484 aa, Dasypus novemcinctus
MDRISQILQDYGHDVTMLKQDALLMSEFKEEEKSYHIIHWNLPEDFKKEFMKYFNFFMEEALHDRLTFEHFLKFMGQLGTQCNHFLRRKDILESLKNENFDLVVAETFDCCSFLIAEKLGKPFVSVISSSFGVVDFGLPRPVSYVPVFNSLLTDRMDFWGRVKNFLMSFDFSVKQWRIHSQYEEAIREHFPEGSRPVLSHLLLKAELWFINSDFAFDFSRPLLPNTVYIGGIMAKTSKPVSQDFENFIAKFGDSGFVLVALGSMSSTYQSQEILREMNSAFARLPQGVIWKCKTSHWPKDVKLAANVKIVDWLPQSDLLAHPSIRLFVTHGGQNSIMEAIQYGVPMVGIPFFGDQPDNLVRVEAKNFGVSIQLKELKAEILVLKMKQVMEDKRFRSAAVAASIIRRSHPLSPAQRLVGWIDHILMTGGSAHLKPYAFQQPWHEQYLLDVFAFLLLVTLGSMWLCGKLLGMVARWLCGARKLKQA

SEQ ID NO: 7204 - protein, 533 aa, Bombyx mandarina
MYCAFQREITKKMIRIIVIIMLLIRILQGTQAARILGVFPTPSISHQVVFRRLTLELHKRGHELVIVTTDPMYQKGEAPQNYTEIDVHDISYTTWRNDFMKLSRGSSDDLFEQTAVILELTTNLFEMQLKSKEVQALIKVKDAKKFDLLLLEACIRPAIILTHIFDAPAILVSSFGGVEYVFRILGVPTHPVLYPPPLHQRIFNLTFWEKTHEIFTHYYLEYLFWKAEYKVDEMVKRIFGPSTPTVRDTYKNVEMILLNAYAVWENNRPVPPNVVYVGGLHQKPEKDLPGDLKEYLDSSKHGVVYISFGTNVEPSLLPPERIQLLIKVFSELPYDVLWKWDQDELPGKSENIKIAKWLPQSDLLRHPKIKVFITQGGLQSTEEAITAGVPLIGIPMLMDQWYNVEKYVQLNIGLKLDLGSITEDSFRNAINTVTGDESYRQNVARLRSQVFDQPQGPLERAVWWTEHVLRHGGATHLRAAGALKSWTEYFELNLIAVLLVSFLMAIAFIVTLISSLMTSLKMYFNYDDKIKKH

SEQ ID NO: 7205 - protein, 413 aa, Erinaceus europaeus
MAKKWASLLFLLQLYCCFSCGSSGKVLVWPMEYSHWINLKTILDELTERGHEVTVLTSSASILVDPSKQSAVKFEVFTTSFTKDKLDSIFMTLIKMWTYELPKSSLWFETFNKKKWDRFFTEVLGRPTTLCELMGKADIWLIRTYWDFEFPHPYLPNFEYVGGLQCKPAKPLPKEMEEFVQSSGEDGIVVFSLGSMVETLPEERSNMIASTLAQLPQKVIWRFDGKKPATLGPNTRLFKWIPQNDLLGHPKTKVFVTHGGGNGIYEAIYHGVPMVGLPMFVDQPDNIAHMEVKGTAVRLDLNTMTNTDFLNALKTVINDPSYKENAMKLSRIHHDQPVKPLDRAVFWIEFVMRHKGAKHLRPAAHDLTWVQYHSLDVIGFLLACVAATVYIITASCLFCFRKCTKSGKRKKND

SEQ ID NO: 7206 - protein, 516 aa, Trichoplusia ni
MHILYLLTCLFFTKTSEAARILGVFPTPSISHQVVFRRLTQELAKRGHDVTVITTDPAFPKGEAPANLTEIDVHDVSYQLYVQYAANVPRGHANDMRQQIEKLISFNVEAVDKQLSAESVRRLIEDKNQKFDLLIIEARVRPALAFTYIYDAPVILMSSLGALFHNSEAFGIPTHPILYPTVNRQRLNNLTMWEKITESYTYYIVQKLFYDSIRLEDKMLQKHFGSNIPSVTELYNKVDLLFLNMYPVFEGIRPVPPNVIYMGGLHQNSEKELPQDLKSYLDSSQNGVIYMSFGTNVDPTMLPADRIQVLVEAFSQLPYDVLWKWNGDELPGRTENIRISKWLPQSDLLRHPKLKLFVTQGGLQSTDEAITAGVPLIGVPMVADQWYNVEEYVYHKIGLRLDLGDMTVENFKSSILKVINDDSYRQNIIKLRGFMRDEVQTPLERAVWWTEYVLRHGGAKHLRSPAANISWAEYLELELVLTLLAGLFSIITVFVMILFALYKHFFSNNKEKCAEH

SEQ ID NO: 7207 - protein, 490 aa, Papilio machaon
MKLLGLILLFTLKFSNIYGARILAVFPIPSISHQVVFRPIIQELLKRGHELVVITPDPAFPKGKAPVNLTEIDVHDLSYTTWEKFIQRSEDTGSSWVDKLIFVLSVIEEVFEEQMISQEVANLLKQNEKFDLLLVEACVRMSLGLSHVFKAPIIQISSFGSTFKNSEAIGSPFHPFLYPSLFRYRIHDLNIWEKIAELYNELYYHYSLQLNEIHENVVMKRLFGEETPMIHELFEKVEMLLLNVHEIWDNNRPVPPNVIYLGGLHQNVKKDLPKDLQTYLDTSANGVIYVSFGTNVRPSLLPMRKIKILTEVFSELPYEVIFKWDKDELPGQTSNIRIMKWLPQADLLRHPNIRLFITQGGLQSTDEAITAGVPLLGIPMLGDQFYNVEKYEKLKIGRGLNMDTLSKETLAAAINTVIEDESYRRNIQHLRTVMNDQPMKSLDRALWWIEHVLRHGGAGHLKSAGAHVSWSEFIELDVIIVLTLFLLFYN

SEQ ID NO: 7208 - protein, 531 aa, Ovis aries
MACLAFFARVSVAVFFLALWGFALGDRLLVVPQDGSHWLSMKDITERLSEKGHEIVVVVPKVNLLLQESKHYTRRIHPVPYDQEELEARYRSFGKHHFSPRWLVTAPMVEYRNNMIVINMYFLNCQSLLRHSGTLRFLRESKFDALFTDPALPCGVILAEYLNLPSVYLFRGFPCALENTFTRTPSPLSYVPRYYTQFSDKMTFLQRVANFLVSYLENILLYALYSKYEDLAEEVLGRQVHLPALYQKASIWLLRYDFVFEYPRPVMPNMVFIGGSAAKKQGILPREFEAYVNASGEHGIVIFSLGSMVSEIPEQKAMEIADALGKIPQTVLWRYTGTPPPNLAKNTKLVKWLPQNDLLGQPKTRAFITHSGSHGVYEGICNGVPMVMMPLFGDQMDNAERMETRGAGITLNVLEMSSGDLENALKAVINEKSYKENIMRLSRLHKDRPIEPLDLAVFWVEFVMRHKGASHLRPAAHDLTWYQYHSLDVIGFLLAVTLTVIFITFKACAFTFRKCFGKKERVKKSHKSKTH

SEQ ID NO: 7209 - protein, 535 aa, Trichoplusia ni
MRIFLVANTHPNKKRETMYIYFYLLTCFTLCLKINEAAKILGVFPTPSISHQVVFRPLMLELAKRGHDVTVITTDPIFPEGGTQANFTEIDLHDESYRIWREKLMKIAASGKDDIWTFIEGLKMFPDIFEKQLNDENVQRLLRDNKHFDLLILEACFRPALIFSHIYKAPVILMSSLGAMFDNFATVGVPTHPILYPNLLRQKLYNLTMWEKITELYSIYKVQFLYARNLDYEDNLIRKYFGENTPSLAELGNNVDMLFLNVYPVFLGIQPVPPSVVFTGGLHQKPEKPLPEDLKKYLDSSKNGVIYISFGTNVDPTQLPPERIQVLVKAFSELPYDVLWKWNGDELPGRSENIRISKWLPQSDLLKHPKIKVFVTQGGLQSTDEAITAGVPLVGVPIMGDQWYNVEKYVYHKIGVRLDLEDITIENFKNTLLKVIGDDSYRQNIIKLRSLMRDEVQTPLERAVWWTEYVLRHGGAKHLRSPAANISWAEYLELELVLTLMAGLLVALTACVIIAISFYKYFLRKYRTAVKVKSS

SEQ ID NO: 7210 - protein, 265 aa, Mandrillus leucophaeus
MPNMVFIGGTNCKKRKDLSEEFEAYINASGEHGIVVFSLGSMVAEIPEKKAMAIADALGKIPQTVLWRYTGTPPSNLANNTILVKWLPQNDLLGHPMTRAFITHAGSHGIYEGICNGVPMVMMPLFGDQMDNAKRMETKGAGVTLNVLEMTSEDLENALKAVINDKSYKENIMHLSSLHKDRPVEPLDLAVFWVEFVMRHKGAPHLRPAAHDLTWYQYHSLDVIGFLLAIVLTVAFITFKCCAYGYRKCFGKKGRVKKAHKSKTH

SEQ ID NO: 7211 - protein, 285 aa, Danaus plexippus
HQIVFRKITQELHKRGHELTVLTPDPAYPKGTAPANTQIIKLKDLEIYLNSSQHGVIYVSFGTNVLSNMISTDKIDNIVKVLSKLPYDVLWKWDGKELPGKSENIRISKWFPQSDLLRHPKIKLFITQAGLQSTDEAITAGVPLIAIPSFADQWYNAEKYEKFGIGIPLDIKTFTEEELHHAVITVINNESYRRNVIKLRETILDQPMSSIERAMWWTEYVLRHREKNHFRTLASNLSYMDYFDVKFWMTIFAIIGIFLTLFVVTIAYVIKLLNKMWIYNKVKTH

SEQ ID NO: 7212 - protein, 251 aa, Leptinotarsa decemlineata
MPYVTAFTTSREDLKEFLDEADEGVIYFSLGSNVKSVNISDRVRDTLMEAFADLPYKVLWKYESDNLVNKSHNVYIRKWLPQQDILAHPNIKVFISQGGLQSSEEAISRGVPILGIPFICDQEMNMKRLIQLEVAVGVDFVTVTKEEIVDAVREIIDNPKYRQNMKKLQSLWVDQPMTSMDRAMWWIEYVIRHKGTKHLRSPTADVSWIEYLLLDVIAVLSSALVIFIFLVTVIVKFFIRFCSNEKKFKIQ

SEQ ID NO: 7213 - protein, 520 aa, Trichoplusia ni
MRFLVHLFISYIFFVNINEGAKILVVVPTSSISHQVVFRPLTQELAKRGHDVTVITTDPAFPKGGAPANLTEIDLHDLSYNMFIQETSKMPKGNKDDLLVQMKTYLRVSALIFGEQLKDGNVQLLINDKNVKFDLIIVEACFRQSLAYSHVFKAPVIQMSSFGGVFDNFATIGAPTHPILYPDIMRQKLNHLTMWEKITELYNHYMLKWIYHNNAHLENKILQEILGPDVPTVTELYDNVHMLFLNVYPVFEGVRPVPPTVVYTGGLHQNPEKELPKDLKSYLDSSKNGVIYISFGTNVDPTMLPADRIKVLVKAFSQLPYDVLWKWNGDELPGRTENIRISKWLPQSDLLRHPKIKVFVTQGGLQSTDEAITAGVPLIGVPMLGDQWFNVEKYVYHKIGVRLDLEDITIETFKNTLLKVIGDDSFRRNIIKLRSLMRDEVQTPLERAVWWTEYVLRHGGAKHLRSPAANISWAEYLELELVLTLLAGLLVILFSTSLIVYKTYQLFLKQRLTPVKVKST

SEQ ID NO: 7214 - protein, 425 aa, Papilio machaon
MFAVNLSAFLLSLVISNNEAANILALYPSPSISHQDVFRPITLELVKQGHDVTVLTPFPMFKKGEAPKNLREIDVLDVTFGIYLDHFTKAVTGSKSDLYMQFVNMTSAIHLSSAAQMNAKEFKDVINDPEAKYDLIFIEALYTPFLGISHVFKAPIIMVSSFGPYIDTYDIIGSPTHPFLYHHMYRQRLYNLTLWEKVSELTMSLRFQKVLDEAEDKNNRLLKEVFGPTTPNLSVLKNNVDLVFLNIHPIWEGNYPVPPNVIYMGGLHLSTPKELPRELKEYLDNSTHGVIYFSFGSNVRPSMLPQEKFAIFKKVFSQLPYNVIWKWDTEDFKVDSPNIKIYKWLPQADLLRHPNVKVFITQGGLQSTDEAITGGVPLIAFPMLGDQWYNAEKYEYHKIGIQLDFENLTEDKLKDAITKIVEDKR

SEQ ID NO: 7215 - protein, 1179 aa, Caenorhabditis brenneri
MFVLYDEFRPMCEKIYQDKQLHQQILELKPDGYVAEAFDFCSLYLGDHLKLNLLPMFSSIKSVPVARAIGEPSLLNYAPTLSTAYGPQQTFWDRLQDIPMVTSFYYALSSLFDRQYGQAHSLLNGDVRNWKEIVQTATFFFYNNNPYVGFPMPILEKSVEIGGITIEPATSEKVDEEFDRILNLRNSTVLMSFGTVVLSVDMPERFKNGIIAAFTSLPDTTFIWKYEETDEQKLKKLSLPANVILKKWVPQPALLADNRLSLFVTHGGLGSTLEVAYSGKPSIIVPVFGDQLFNAKMLSRHGGAIAYDKYDLADGKLLTKTIQKALSSQSMLQNSQRLAKILQNQPFSPKSNFLRHAEFAAKFGRVESLEPYHVQYNFIQAYMLDAYAMDLFNGEGEEPERNDSEEPVEMEDEELEDVELAPKGKQNNKKRKRTSSEDSSMEDNSPKGDKKKVKGPLSNTNKSINVGKDFQAVIEENEDLTNFRDYTPDREQAYWEHHGDVDTDELEQFVNEKSAKYLVPIDRVLFILMEKKMNYREAAVEIAKRNILQDGWKDDERFAFENSFTHVGKNFHQMHAAIAHRSLRSIIHYYYDSKKSITYRAFATKSITEVETLEEFEPAVEKQPAGVFENMCENCGERAEKMMWNEQMNRIECNACLIYFRNMLVPRPTSLRLVMDERFDGQIPCPDSEFTPRSIDNTERQKAIPAMRDMMKCYNRLAAPATGKTFELRKVKDLFSMDQIVRTKKSNCKRFRIPPRFLKTDLKNLPVNRSFYMGGEPIGGPSSTSNGAFDRAFDTLNGVVEKLEREINSLPLTVDVREPPEEDEEGVEVVEEAAEQGLLMVDTMATGSEDTPEDAPEVEPVAESKIEEEEVSEAPEAPETDPEVKQNESPGEPAPNSENPSEEPVKDSSESPEKSSDSSEASKGSSSEETISEQAPETTEVSQNPEESKSPEETPRSSESPEKKPKRKSLPKKKIKLSSSSINLSEMSAKKSKKSKKSTESSLNVPSSSNGTKLSGRPPGGPSMYIWHNKRKTQCQEEIEVLLDDSRRKLFEAGQHSSKIDYKQVNNWKNDMAALRERMHKPNLDMDLYPQIVYAGERTRFARDWTEEDHKNVQRLFRWYGPNFQQIADVMGNKTADQVYNFYLSNQEAIELDHEEFTRHAGKAVELADERKCQKKLGL

SEQ ID NO: 7216 - protein, 380 aa, Heterocephalus glaber
MWNSAGGLSELWRLKYSVRGLELTAVSCGSPVNQEADGPVMEAEGSTEEAKRSALEAGDDVQGEGDDWSSSKETEADLPLFISPFLFITTQEFEGYVNASGEHGIVVFSLGSMISDIPEKKAMAIAEGLGKVPQTEFEGYVNASGEHGIVVFSLGSMISDIPEKKAMAIAEGLGKVPQTVLWRYTGTPPSNLAKNTILVKWLPQNDLLGHPKTRAFITHSGSHGIYEGICNGVPMVMMPLFGDQMDNAKRMETRGAGVTLNVLEMTSDDLANALKKVIYDKSYKENIVRLSTLHKDRPIEPLDLAVFWVEFVMRHKGAPHLRPAAHDLTWYQYHSLDVIGFLLAITLSVSFITFKCCAYGFRKCFGKKEHVKKTPKSKTH

SEQ ID NO: 7217 - protein, 521 aa, Neodiprion lecontei
MDGSFTKLGTILVILAGVWITEGSKILAIFPYQGRSHNIMFEPIVIGLARAGHSVDVVSHFPPKESIRGLNHISLQGSLYTFVNNMTTTYVKSLIGTKAIEFISYQGPNDLCNLMRLHQLQEIINTDKNYDLMLTQVLGSNCYLALAHKLKLPVVNIETSTMFPWAHDPFFESTYPSFIPCQLTTFTNDMRFMERVENLITTLYSKFLFYYYDKTVSEPIARKYIDDFPSLADIYYNISMVLVNSHWSIHGARPTNPAIVEVAGLHIDETQVLTEELEVFLNSAKDGVVYFSTGTMLKSDSFSKEKILAIYNSFAELSNYKVLWKGNMDNMPEGLPTNVKMVPWVPQFAVLRHPKVKAFVTHGGLMGTLEAIHAGVPMVGIPFFGDQMLNVGGYAYRGFAVYLNYETLNKESFSEALNEVLTNPKYQSNIARVSRLFKDRPLSPLKKAIFWIEYVIRNGGETLKSSGRHLYWFQYYLIDVGLFLLTITMLAFVVLFTVSRKLTGFIWGTQNRNVSVKQKTF

SEQ ID NO: 7218 - protein, 480 aa, Caenorhabditis briggsae
MNENLQKQHRLLLPLETSSDYRESFYGNQFSEVLQEREVLDQLKNEKFDLAITEVVDGCAYAIFEYLKVPAHITVLSCARFDHVSDVIGQPIAPSYVPSTQSFFNDRMNIKERFLNAVQFYYGRYTFANILDHEFEMAKEILGIERSWRETMPESSFIFSNHIPVLDFPAPTFDKIIPVGGFTVKTNEKVLKLDEEWDEILNIRKKNVLVSFGSASKSKDMPEEYKQSLLQVFKSMPEITFIWKYEDSSDNIAKDLDNVYTSSWLPQNELLADPRITVFVTHGGLASVMELALMGKPAVMVPIFADQGRNAQMLKRHGGAAVLQKTDLINSDLVRDTLHDVLTNPRYSLFFWNSNPQNFVLCRYAKNARRVAEMLKNLPTNAKEVLVKHVEFAARFGKLPSMDNYGRHQNIFVYYFLDIITLLILVLVLVICIFKFNDNPSVIISNLTELSFDFASIAVFREFLLVVDLQKKLLGSKIFI

SEQ ID NO: 7219 - protein, 388 aa, Trichoplusia ni
MRFLVLLVLSYIIIIIGNTEAAKILVVVPTPSISHQVVFRPLIQELVKRGHDVTVITTDPAFPKGGAPANLTEIDIHDLSYNILTQEMAKMPRGNKDDLLLQVEFYLKVSASVFSEQLKDKSVQQLINNKNIKFDLLILEAIFRQALVFSHIFKAPVIQMSSLGGVFDNFVTIGAPTHPILYPTMISQKLTNLSMWEKITLLYSLYVGERIYQNNAILENKLNRELFGPEVPSVTELYDNVDMLFLNVYPVFEGIRPVPPSVIYTGGLHQNPEKELPEDLKSYLDSSKNGVIYISFGTNTDPTQLPPERIQVLLKAFSQLPYDVLWKWNGDELPGRTENIRISKWLPQSDLLRHPKIKVFVTQGGLQSTDEAITAGVPLIGIPMVGDQ

SEQ ID NO: 7220 - protein, 564 aa, Papilio machaon
MRLLSVILFLIIIKLCSAYKILLMFPVPGRSHAILGEGFVRHLLNDGHEVTYITPIIMDIIHPRLRQIDISNNFKLMPPDQMFDTRNILMNKWDIKDIRFMLFVTTNFVNGTLTHPNIQRLIHDTSEQFDAVIVEWLYSELYAGFASVFDCPLIWSSSLDPHWLVLDLIDEVPNPAYNPQHLADIVTPLGFWNRAQELWHVIHTKYFKWRLRHRENQIFNNAFASSVALRGRKLPPLNEVRYSGSLILGNSHLSAGTAIRLPPNYIPIGGYHIKENIDSLPSNLQEIADNAQNGFIYFSMGSMLKSSRIPDEMKKGLLDVFSKLNQTIIWKFEQDLPDRPKNVHIVSWAPQLSILAHPNCKLFITHGGLLSVLETLHFGVPIIGVPMFGDQHMNINRVVEKGFGMRVDLNDDVVVNMEIAIREILDNPRYTQKVKEYSFIFHDRATPPGKELTHWVSHVIRTKGAPHLRSPGNMLPWYQKLYLDLAIVMFIALYLSVKILFQIFLVTPMPVISHAILGNAFVKLLLNAGHKITHITGIPYNISHLNLRRLEIDYHFESLQVTST

SEQ ID NO: 7221 - protein, 516 aa, Spodoptera exigua
MFSRSVLSLLVIFIRINDAARILAYFPAPSISHQVVFRPLTQELARRGHEVIVITPDPAFPKGKTPKNLKEIDVHDLSYNIWNTLFEKTSTGDPDLAFQMGLVYNVMVDMVERQLSVDEVQKMLKENKKFDLLMIEACVRPALVLSQLVNAPVIQVSSFGPMTFNVETMGSAMHLFLYPNHMRQRLYNMTIWEKLVELYNIYRIEKAIGEIEEADNVMGKGLFGPDTKTISELKDNVHMLFLNIHPLWEGNRPVPPSVIYMGGLHQKPVKELPKDLKTYLDSSKNGVIYISFGTNVLPSLLPQDKIQMIAKPFSQLPYDVLWKWDKDELPGRSKNIRISKWLPQSDMLRHPKVKLFITQGGLQSTDEAITAGVPLVGIPLIGDQRYNTEKYVHYGIGVKIDFPTLTEEIFDKAINTVLSDKSYRQNIERLRRVMYDQPQTPLERAVWWTEHVLRHGGARHLRGPAANMSWTEYLELELVFTVLGIILSILVVLSFLLLKLWRCLKPTARQQKVKNN

SEQ ID NO: 7222 - protein, 533 aa, Carlito syrichta
MATGLQVPLLRLVGLLLFLSVWPWAEGKKVLVIPVDGSHWLSMREVVQELYARGHHTVVLTTEVNMHIKKEDFFTLETYALPYTQDEFNQLIKGYIKLFFGKEHFLKKFFKSMAILKNMSLVFHKSCVDLLHNKTLISHLNASSFDVVFTDPIYPCGVILAKYLSIPAVFFLRAIPCDLDFEGTQCPGPSSYVPRLLTMNSDHMTFLQRVKNMLYPLALTYICRVFIVNYASLASELVQREVSFVDILSHASVWLFRGDFVMDYPRPIMPNMVFIGGINCANRKPLSQEFESYINASGEHGIVVFSLGSMVSEIPEKKAMEIADALGKIPQTVLWRYTGSRPSNLAKNTILVKWLPQNDLLGHPKTRAFITHSGSHGIYEGICNGVPMVMMPLFGDQMDNAKRMETKGAGVTLNVLEMTSADLENALKIVINDKSYKENIMRLSSLHKDRPVEPLDLAVFWVEFVMRHKGAPHLRAAAHDLTWYQYHSLDVIGFLLAIVLTVAFVAFKCCAFGCRKCFGKKGRAKKAHKSKTH

SEQ ID NO: 7223 - protein, 520 aa, Bactrocera latifrons
MHFPSVILMITALLCAANVQAYRYLAIMPTGARSHHIVGSALMKELARRGHQVTVISPFPLKKPMENYVDIEIPTIKAVMENTASALLKTTEKTVVENVRGFYEMGLNMTRIFLEENNVKALLASNQTFDAIICEIFLSEALYGLSEHYNVPLIGLGTFGAHAWNTDMVGSPSPPSYVANSLLPFNERMTLWQRVGNFAFGIFERLLLDLYYLPKQAAIYKEYFPNNKRDMYEVRRNAALVLLNQHVSLSFSRPYVHNQIEVGGMHINRKRSPLPADLERFINESKHGVIYFSMGSNVRSKFLPVEKRKAILETFRGLKQRVLWKFEDPKLEGKPDNVYISEWFPQDDILAHPNVKFFITHGGLLSTTESIYHGKPFIGIPIFGDQFLNMNRAETGGYGIGVDYNGFTKEKFQSAIERMLNDESYTKRVADISAQYRDQPMNPLDLAVYWVEYVVRHKGARHLHCAGQDLNFIQYHSIDSMLIIFGGLTLVLLLILLLIRSVWGWLQFALARKDIKKKTQ

SEQ ID NO: 7224 - protein, 429 aa, Papilio machaon
MFPTPSISHQVVFRPLTQELAKRGHEVIVITPDPAYPKGQAPKNLTEIDVHDISYSKWKIMMGRIKDVARDIIAQLEVIINSNNAVFEEQMKTESVQEILKYKDDYFDLILVEACVRPAIGLSYVFKAPIIQRVFGENVPRIDELYDNVAMLFLNFHRIWDSNRPVPPSVIYMGGLHQNPQKELPKDLKSYLDSSKNGVIYFSLGTNVKPSDLPSDKLQAIINVFSRLPYDVLWKWDDEELPGRTKNIKISKWLPQSDLLRHPKIKLFVTQGGLQSTDEAITAGVPVIGIPMLGDQWFNAEKYVHFNIGHKLDIDTLTEEQFDNAIKSILNNNSYRENIVRLRSIMQDQPQSPLDRAVWWTEHVLRHGGARHLRGPAANISWAQYLELELVFTLAAILISSLFVLFIVAKLIWNILKVQLSAVIKVKKS

SEQ ID NO: 7225 - protein, 1018 aa, Papilio xuthus
MVHLITVIVLSISLCITLCDAFKILVVFPFPAGSHCNLGDGYVRHLLKAGHEVTYITPFPKKNSNQNLRQINVADNIYAVNGQALNVQALMKHEVEMDQDLLFHMTVNVTKKTFENAAVQKLLNDPSEHFDVVIAEWMFNEIYSGVAAVFNCPLIWSFPYEPNFVGLSLIDEASNPAYSANIQFSDIPPFTFTQRVFALWFQIMHRVKYFLFYEKIETDVYENIFKTIVEKRGGHLQPYKEFKYSAAMILGNSHVSLGQAMRLPQNYVPIAGYHIDDVTPLPEDLKFIMDNAKNGVIYFSLGSNLKSKDLPTNIKKNLLKMFAELKQTVIWKFEEALPDLPTNVHILQWAPQTSILAHPSCILFITHGGLLSTTEAVHFGVPSIGIPVFFDQNFNVDQAVRRGITLKVMLSENCHIHLKNAIQDMLENPKYRQKMKELSFVYHHRPVPPGKLLVHWVEHVVRTNGAPHYRSVALLLPWYQKMYLDLIVTYITPFPYESSDPNLRLITTGDTVNAISGSSLNITALMLHEVEMDQDRHFQLAINITKNTLKNKSVQKLLNDPSESFDVIVAEWMFNDVYCGFSALFRCPYIWSFPYETNSISLGLLGEFSNPAYTANIETSDVPPFDFWQRVYSLWFRITSRVQHLLFSALFRCPYIWSFPYETNSISLGLLGEFSNPAYTANIETSDVPPFDFWQRVYSLWFRITSRVQHLFFYENIEKNLYEEIFSPILKKRGITTLPEYDILRYNASLILGNTDPSIGQALALPENYIPIAGYHIDEVKPLPQDLKDILDDAKHGVIYFSLGSNLKSKDFPEKILQDLLKLFGELQQTVIWKFEESLTNKPANVHILKWAPQQSILAHPNCVLFITHGGMLSVTEAVHFSVPFIGLPVFYDQNFNVAKSVQRGFAIKVSLSLNLAVELKDAVQEILNNNTYREAMKQTSITYHNRMIPSGDELVYWVEYVVRSNGAPHYRSAAFLLPWYQKMYLDFIAMVIACVCLFIYMIKTFCIKSKVQKIKSS

SEQ ID NO: 7226 - protein, 970 aa, Aethina tumida
MGKLIIFICAVLLCFTQDGQCARILASIFSPSFSHQLAFRPIWQELAKRGHDLTVITTDPVKDAPYKQIDTSHSYKMMEELGMSNAVSNRNQSARDAGKNYIDGLHKISDYQFGMPEVQALINNKKEHFDLLMIEVIFPGQMAFVDRFKAPFIGLVSLDAPPVIHRAVGNPTHPILYPDTVLPFNNDLNFKQRLISFAANIGFYVFSEYFFYPKEDLNVKKHFGEFPIRPLSEIQYDMDLLFINVNPFFHKLRPLGPNTIQIGGGTHLQKAKALPQDLQSFLDKSKNGVIYFSLGTNVKTSLISDELKATIIETLGELPYDVLWKYEDEMKGLPKNIKISKWIPQQDVFKHPKIKLFITQCGLQSIEEAISNHIPLLGMPFFGDQSKNAQVVLEKGLGLVVDKSILTKEEFKSKILETIKDPKFKNKVKEIAELMVDVQMTGLQKAVWWTEYAIRNKGAKHLRSSGVQDPFYIYFMLDVIGFVLLIVSIITYINYRITKFVYRVTLLTTDPVKDPKLKNLTEIDLSFTYDIFKRYNFPEFAANESKSFMQIGKELGEMLAEGFDAQLSSPEVQKLIHSEDVQFDLLIVEAQLPIMLGFGWKFQCPIIGVASLDASMNYHDTIGNPSHPIVNPDPNLPIGDPDNLSFKDRVTSFIYTNLYRYQVFNKYYPKENLRLRKFFGDDAPDLVEIQKNISMLMVSTNPIFHSVRPVNPNTIFIGNGLHLTPPKPLPKDLQKYLDNSKNGVIYFSLGSNVKGRLLNDTTKREILNAFADLPYNVLMKMDTELKDVPKNVRIEKWLPQQDILRHPNVKLFISQGGLQSLQESITNGIPLVGIPFFGDQISNVYRMVKKGYGVRLDKKEITKDNLKAAILEVMNNPKYREKAKEMGELLHDEPMTSLEKAVWWIEYVIRHKGAKHLRSPAVDLPVYQYYMLDVIGFLLLVTIIPIYLFVKILKFIVRKICCKKSKSKRD

SEQ ID NO: 7227 - protein, 696 aa, Papilio xuthus
MFPTPSISHQVVFRPLTQELAKRGHEVIVITPDPAFPKGQAPKNLTEIDVHDISYTKWKKIMSGIENIPRDPIEQLQVIINASFTIFEDQVKSESVQEILKYKEDYFDLILAEACIRPTLGLSYVFKAPVIQVSSFGAVMDNHDIIGSATHPILYPNLARERLYNLTMWEKISQLRNEFKSLTYTMNRGYDNQILKRLFGNNAPSIDKLYDNVAMLFLNFHPIWDNNRPVPPGVIYLGGLHQNPQKELPKDLKSYLDSSKNGVIYFSLGTNVKPSYLPPEKLEAIIKVFSRLPYDVLWKWDNDELPGRSSNIKISKWLPQSDLLRHPKIKLFITQGGMQSTDEAITAGVPLIGIPMLADQWYNVEKYVHHKIGLMVNINTLTEEKFENSIKTILNDNSYRENIVRLRSIMQDQPQSPLERAVWWTEHVLRHRGARHLRSPAANISWTQYLELELDLQKYLDSSVNGVIYVSFGTNVRPSLLPLEKIKILTEVFSELPYDVIFKWDKDELPGQTRNIRIVKWVPQADLLRHRNIKLFITQGGLQSTDEAITAGVPLLGIPIFADQWYNIEKYEKFKIGRGLNMDTLNKETLAAAITSLIEDESYRRNIERLRTIMNDQPMRPLDRAVWWIEHVLRFGGAAHLKSAGAHFTWSEYFELDILIILILLTFISLILSSLFCIAAWKFLSKYIWNVKLKTF

SEQ ID NO: 7228 - protein, 529 aa, Zootermopsis nevadensis
MVYTALLIRLRQMDHRTVLLLLLGAVCCTRSARILGIFPSPSISHQLPFQNIMKALASRGHQITVISPSPLKTPLPNYTDVDLSFSYEIIASFVDVTAMVEASPYEFCEQLIYALNIITEHQLSSPPLQAFIRSNDTKYDLVFLEALMYQSYHGLIHHVGSPPVIGILSVEFLLTMGDAMGTPTNPAIIPDVLLPHGDHMTFHERLQNTLFWLWTRYKKYTEWLPAQEELMRKFFGPNSPSIIDAERNISLLMVSSNWIFNYPIPLVPSVVTFHSLHVKTKTDPLPEDLQKFLDEAEDGVIYFSLGSNVQSDRIPEEKRIIFLEVFSELPQKILWKWESDILPRQPSNVKIGKWLPQQDVLAHPNIKMFISQCGLQSFQEAVYFGVPILGIPFFGDQKYNAKKIVTEELGVQLSLQDLTKETLSAAINAVLNDPRYQNSMKKMSAISKDEPQNSLDRAVWWTEYVIRHKGAKHLRSAAHDLAWYQYLLLDIVAVLILLLAITIFVSYIFLKNIYRYLTKKYYEVKSKHD

SEQ ID NO: 7229 - protein, 530 aa, Papio anubis
MTRTGWSSPLPLCVCLLLACGFAEAGKLLVVPMDGSHWFSMRSVVEKLILRGHEVVVVIPKVSWQLGRSLNCTVKTYSTSYTLEVLDREFKAFAQAQWKAQVQSIFSLLMSSYNDIFDLFFSNCRSLFKDKKLVEYLKESSFDAVFLDPFDTCGLIVAKYLSLPSVVFARGIFCHYLEEGAQCPAPLSYVPRILLGFSDAMTFKERVRNHIMHLEERLLCHRFFKSALEIASEILQTPVTVYDLHRQISIWLLRTDFVLDYPKPVMPNMVFIGGINCHQGKPLPMEFEAYINASGEHGIVVFSLGSMVAEIPEKKAMAIADALGKIPQTVLWRYTGTPPSNLANNTILVKWLPQNDLLGHPMTRAFITHAGSHGIYEGICNGVPMVMMPLFGDQMDNAKRMETKGAGVTLNVLEMTSEDLENALKAVINDKSYKENIMHLSSLHKDRPVEPLDLAVFWVEFVMRHKGAPHLRPAAHDLTWYQYHSLDVIGFLLAIVLTVAFIAFKCCAYGYRKCFGKKGRVKKAHKSKTH

SEQ ID NO: 7230 - protein, 521 aa, Bombus terrestris
MKLLSVVLICTLLSISHGYRILGVFPFNGKSHFMMFEQLMKILAKRGHQVDVISTFPLTKPYPNYNDLIVLPAGRQFMNNMTYNEIKTLFADSPTHAVATLAGNDICEFLNNSQMQQLIRNPPNDPPYDAVIIEVFGAQCFAIFGDILKVPVIGASSSVLYPWIYECIANPENLAFAPSNLVAYPQNMNFWQRMYNFVNTVYTKWRFQAKTTKQTDILRKYVSPDAPDIREVEKKISIILGNSHMSINGIKHTTPAYIEVGGLHVRDEGVELPLSLEKWMNESTHGFVYFSFGSMVKIESFPMNLLNIFYNSMSKISPIRVLMKIAKPDELPPGLPKNVHVLPWVPQVKVLQHKNVKAFITHGGLMGTQEAIQYGVPLIGIPLFADQFININTYVRLNIAVGLEIDTLTEEKMDHALNSILNDPKYRDTAKKLSRKFMDRPLSAADTAIYWVEYIIRHGANALRSPAMDLTWWQVELLDVGAFILIAIIAALYIIMTVIQFMFNLTFSNSNSNDLRKKKIS

SEQ ID NO: 7231 - protein, 484 aa, Tetraodon nigroviridis
MKTCSVFLVLLCVSTSAFGGHVLVFPGEYSHWLNIRTIVDELVRRNHSVTLLVADASPSVNYNNSLDAAKFNFLVYKVPFSRSEFHQLTENLVHFSMYEYHAASYLERFRKMHAWTQAFLGYGLKQCESMLRNKQLMATLRDAAFHAVLLDPMAMCGDLVADVLGLPLIISLRFSFGAVLERHCGHVPAPPSYVPPPPLPYSDRMSFTERLVSVLTYAFTSAVTKLVWSWTLDGFYSEIKGSPSTMCETLGRADIWLMRNFWDMETPRPTLPNFKHVGGLHCKPAAPLPEARDLEAFVQSSGEAGVVVVTFGSMVTNLTSERAEVFAAAFGRLPQKVVWRYRGEPPKALSANTKLLKWIPQNDLLGHPKTRAFVTHGGANGLYEALFHAVPLVGIPLFGDQPDNLARLVRLGIAVSLDFNHLTSDQLTEALDTVITQGSYRASMRRLSRIHRDQPATPLDTAVYWVEFVMRHGGANTCARRPTT

SEQ ID NO: 7232 - protein, 239 aa, Camelus ferus
ELEELVQSSGEDGVVVFSLGSMVKNITEEKANMIASALAQIPQKVLWRYTGKKPDTLGANTQLYEWIPQNDLLGHPQTRAFITHSGTNGVYEAIYHGVPMVGIPMFGDQHDNIARVKVKGAAVEVDLHTMTSSDLLNALKEVINNPFYKENAMKLSRIHHDQPVKPLDRAVFWIEFVMRHKGAKHLRPALHNLSWYQHHSLDVIGFLLACVATIIFLVTKCCLFCCSRFGKTTKKKKRE

SEQ ID NO: 7233 - protein, 532 aa, Ovis aries
MAPAMLMGFFPVCVCLLLTPGFAEAGKLLVVPMDGSHWFTMRSVVEKLSQRGHEIVLVIPEVSWHLSNSSNITIKTYHTAYTLEDLNVAFRKFSDFQWKVRPQSLLPMLISSENTIFDYFFSRCKSLFEDKKLVKYLEESSFDAVFLDPFDMCGLIIAKYLSLPSVIFTRGVFCHYFEEGTQSPMALSYVPRAFLAFSDAMTFEQRVWNLIRHIEERLFCPYFYKNVEEIASQILQTPVTTSELFSQTSIWLLRNDFVLDYPRPVMPNVVFISGINCQKLNQKPLSEEFEAYVNASGEHGIVIFSLGSMVSEIPEQKAMEIADALGKIPQTVLWRYTGTPPPNLAKNTKLVKWLPQNDLLGHPKTRAFITHSGSHGVYEGICNGVPMVMMPLFGDQMDNAKRMETRGAGITLNVLEMSSGDLENALKAVINEKSYKENIMRLSRLHKDRPIEPLDLAVFWVEFVMRHKGASHLRPAAHDLTWYQYHSLDVIGFLLAVTLTVIFITFKACAFTFRKCFGKKERVKKSHKSKTH

SEQ ID NO: 7234 - protein, 510 aa, Athalia rosae
MGHEGFGAKILGLFPYPGRSHLSITSSLMHGLARKGHNVTAFVPNATGLGTPNYKEINYKAVPVTGSTHMLDYLSTSFFVKHFKLYEIGITTTEKALNTSEARDLIRSEEKYDVIIMEEFVNEAFYVFAHKFKCPVILIHTFGTSTVINGLFGNSAPRSYVPLEYLNLGDKMTLSERIQNSLQDMLSVVTRELYYMPRQQALAVKYLGDSGVEIPDLQEIAARQTRFILINNHPVFYTPRPYMENMKNVGGLHLKPAKPLPLDLQQYLDSSQNGVILFSLGSSIQSVQMPERFTEALKKAFQRSPFDVLWKWENDTMARKSSNVRIEKWLPQNDILAHPNVKMFITHGGISSMMEAVYHGVPVIGIPLFGDQMRNILLAVSKGYAESLDFFTTTDDQVYDTIMKVATDSKYKENVKKVSACWRDDLNHPLDRAIYWVEYVVKHDGVKHLKAAVTEQTFVQYLLLDVAFVILTTLVLSFFAIRQMFRLLWRHTYISIYKISSFEDNLKKLD

SEQ ID NO: 7235 - protein, 524 aa, Toxocara canis
MKLFLTFLAFILPVECLKILIYQVAVGRSHMSFSGALTDILADAGHEVHLLISEWNPSAKDDCTKRATSIRRIRMPPNGTTISHLAHLADPFKMTVWKYFSSMEQFKIMKDVPSLFCKMIINDDELMKWLREQHFDAALTSMYDLCPFGLFHVTGIKPVIGYVATPIISNVIAALKIDSPASYTPDLMLATWSGDEMNYGERAKNLFVQAFTSHILLPFLRSYQQAVFIDKFGNDFPSLMALASKTSFVFINSNELFELPRLLSHKIVYIGGIALRPHKKVPEEYSKLLSERDGSVLFSLGSLAKTSLMPLEMKNAFIEAFAKFPNYTFIWKVDADAINDPILKRYPNIKAVSWMPQYDLLRDGRLNAFITHGGLNSINEAIVAGVPMIVIPLFADQNLNAATAVKRGLAYPLDKWNITTEHVTSALKALLLDRSYADNAKLLSRMLAKKPRKPREDFLHYVEFASEFKSVGDNLQLHAVYLNFIQLHCLDIIVPAVIVMILFVYMIFVMTRRVLRRVVKLKKE

SEQ ID NO: 7236 - protein, 519 aa, Trichoplusia ni
MGVSVHYLVFLLFVNTNEAARILAVFPIPSVSHQVVFRPVTHELARRGHDVTVMTTDPAFPNGGAPANLTEIDVHELSYDIWKKNYMIHSKGNEKDTMSQLRISFELFIMLFDEQLRHKDMQKLINDKSQKFDLLIIEGIFRPARALAHVFKAPMILLSSLSPLFDNIEIIGAPGHPLLYPEATRQRLNNLTWLGKLSELYNHYKIQNIYHNSLVYENEMLRKHFGPDFPCVTEFNKDVDMLMVNVNPVFAGIQPVPPSMVFMGGLHIKPDSELPADLKSYLDNSKHGVIYISFGTNVDPTLLPPDQIQVLVKTLSKLPYDVLWKWNGDGLPGRSKNIRISKWFPQSDLLKHPKVKVFVTQGGLQSTDEAITAGVPLIGVPMLGDQWFNVERYEYHKIGIRMDLSSATEELFKDALLKIINDDSYRKNIVKLHTLMVDQPQKPLERAIWNIEYVLRHGGAKHLRSPAANISWAEYLELELVLTLLLVLVAIITVLVLIIRKLLKCFFEKPVPKVKSKRS

SEQ ID NO: 7237 - protein, 533 aa, Pteropus vampyrus
MTTGLQLPLPMLTGLLLFLCVGPWAEGGKVLVVPMEGSHWLSMQKAVKELHARGHQIVVLAPEVTVHIKREDFFTLKTYAVPYTQDEYEQQLLGQVDLIFEKVHFLKMYLNVMAISKNISLFFEKTCAALLYNKDLIGHLNASAFDVVLTDPVYPCGAVLAQYLSVPAVFFLNFLPCDLDYEATQCPNPSSYIPTLFTRNSDHMTFLQRVKNMIYPVSMKYICDITFSPYSRLASELLQRQVSLVDIFSYASMWLFRGDFVLNYPRPIMPNMVFIGGINCADRKPLLQEFEAYINASGEHGIVVFSLGSMVSEIPEKKAMQIADALGTIPQTVLWRYTGPRPSNLAKNTILVKWLPQNDLLGHPMTRAFITHSGSHGIYEGICNGVPMVMMPLFADQMDNAKRMETRGAGVTLNVLEMTSEDLANALKTVISDKSYKENIMRLSSLHKDRPVEPLDLAVFWVEFVMRHKGAKHLRPAAHDLNWYQYHSLDVIGFLLAVVLGVVFIVCKCCVFGYRKCFGKKERAKKSHKSKVQ

SEQ ID NO: 7238 - protein, 794 aa, Oesophagostomum dentatum
MVMVSALGMLSRMYDVIGIPEVPSFMPLAITPYSDEMTFMERLRNFKISVQLRYFIQQWEQEFWKLFNSKYPGFPSIQHIYLEKTALIMINVNEFAETPRPTVNMVRYVGGSTLHDSQPLSEELDRLLNEREANVLFSLGSLAQSKDMPRRLKDDIVETFASFPNVTFIWKYEGDDILHEAHPNIYTTKWVPQTDLLDDRRLSLFITHGGMNSMLEAMFHGVPMVVIPLFGDQQLNSRNIQRRGIGTLVERNKLNKKTLTAAIKKTLNNKKISREATFVASLLAGRPQQYRDDISKWAKIIIEHGLLSAFTSMYVLIVICALVAAISVKASNILVWNPTIAHSHINFMGRVADALSADGHNVVCIFLGVLSVCHRNCRHSCQVCHFSLMRGIILPKYLLQTIFSPSIEADKTYFGNQLPAQTVRYVPRKAGDGYLKEFMKTSIWEAPPCSGVCFDWHAFDMMNDLTLRYCKDLLDDEIMLDRLKRSKFELAFIEVLDVCAPGIIEFFLCITDFLLQILDIKNIILPSGCHMLPQLYEVAGIVGLPSFVPGVVTPYSDDMTFIERFRNFITSLQFKLFIERWNHKFWKLFNAKYPGFPTIKEIYLEKTSLIMVNVNEFAESPRPRTNMIRYIGGAAQPEPKPLSKLFLCTTDFLLQILDIKNIILPSGCHMLPQLYEVAGIVGLPSFVPGVITPYSDDMTFIERFRNFITSLQFKLFIDRWNHKFWKLFNAKYPGFPTTREIYFEKTSLIMVNANEFAESPRPRTNMIRYIGGAAQPDPKPLSKVKRVQGTLTKA

SEQ ID NO: 7239 - protein, 208 aa, Aethina tumida
MDDINRKYFGDDIPDMNSLIDLTDMIFIITDPIFHNMRAVNPNTLNIGGGLHIKPPKPLPKDLKQYLDEAEEGVIYFSLGSNVKGNFLDEQSKKAIISVFSQLPYKVLMKIELENYNIPQNIKIGKWLPQQDILRHPNIKLFVTHGGLQSVQEAVTNGVPMVGIPFFGDQYNNIFKGVKKGFVVKVDKENITEESFKEALLEVLNNPK

SEQ ID NO: 7240 - protein, 277 aa, Oesophagostomum dentatum
MVNSNELYELPRPTLAKVVNIGGLGVQHKDAKPLEGEFKKVAEGGKGMIVMSFGSVAHAELMPEHWKTALLTAFAQFSDYEFLMKYGSDDLKDRLPANVHAYRWLPQADLLLHPSTKVFISHGGYNSLQESINSGVPLITIPLFGDQFKNSRIAVKHGFAVNVNKATISEFSIAEALKEVINNEKYAQNAKRLSQMVRKKPVSPGQLLVRWTEFLAEFQTLDNLTPAGNDLYLFQYFSLDVISCSLVVSFVVLFAVYKILCVTVQRIFSNSTKVKGE

SEQ ID NO: 7241 - protein, 789 aa, Aethina tumida
MGNPRHPAFVPEIFLGFGERMTFLERIQNTAFNVWYRYYHHWINVPDWDKIARKFFGNEMPYLGDLEKEIPLVLVNTNPVLDYVKPSVPGVIEIGQMHIKPKKPLPNDLKDYLDNSKKGVVYFSLGSNVLSSNTAPEFLNAIKEAMSELPYDFMWKWETDDLPNKPQNVLIRKWFPQQDILAFVTQGGLQSMEEAITNGVPMVVIPYFGDQPYNAKRMVHMEIAKELNYKMLTKENFKQAVTEVVENDKYKRNVVKYSKLLVDQPMTGLEKAYYVFFFLCFSLVNSANILGYFPTCSISHQVIFQPIWKELSLRGHKVTVITPNPLNDPSLTNLTEIDISYMYGEMSVMINKILALGEMNIYSRLINQFEILRTLEDDTISSKGIQELLKDDNQQFDLVMVEWFHSIGLGFGYKYNAPVIGVSSFFGIPNIHEVMGNPRHPAFMPDIFLGFGERMSFLERIQNTAFNVWYRYFHHWVNVPEWDKIARKHFGNDIPYIGDLEKNISLVIINSNPVLDYVKPSVPGVIEINQMHIKPKKSLPKDLKDYLDKSKNGVIYFSLGTNVLSSKTDPEFLNAIKEAISELPYNFMWKWETDDLPNKPKNVLIRKWFPQQDLLDHPNIKAFVTQGGLQSMEEAITNAVPMVVIPYFGDQPYNAKRMVHMEIAKELNYKTLTKEDFKQAVTEVIENDKYKRNVVKYSKLLVDQPMTGLEKAVWWTEFTLRHKGDFNLRGYGADVPYYQYFLLDIIALALIIVLVTILSMKRLVKSILSILLFITSREISSYYAIMFYT

SEQ ID NO: 7242 - protein, 517 aa, Cephus cinctus
MKSLKIFTVITVLFGISHGLKILGVFPLSSKSHWMMYRSIVEELMHKGHEIDVITPFPLRHSAPNYKEIIIEVLDLQMENVTLDIIQHSNPFTDTAFMSIMAGNDLCELLRREPLSSFIKNTPRDKYDIFLTEIFGANCYLGFGAHFDVPLVAVTSSVILPWENDYVANPESTSYVPNYMLPYTDRMNFYERFVNTVMSIIIKYEFAYFTKSQDVVLKEVFGPDSPGVRELESKIDLLLVNSHYSINTLRPLVPAVVEVGGLHVHENVADKMTPELEKWMNDSTNGVVYFSLGSMVKPESFPPTIINSLYKSFSQLAPIRVLWKANKTELPSGLPDNVRTMDWIPQADVLRHKNVKVFISHGGLMGTQEAVYAGVPIVGIPLFADQALNINNYVTKKIAVRVDFNDISVKTLSEALNTVINDPTYWVNAKYISKRFRDRQASPLDTAVWWIEYVARYGKGSLRAAAVDMPWWQLALIDVYAAIILILGASLYLLKIIVKLILSAISNHFSAKQKKIQ

SEQ ID NO: 7243 - protein, 454 aa, Papilio machaon
MGIKMRTAVLLVMVLVINSTIAHKILCITPAPTRSHAILGRGIVNTLLEAGHQVTWVTAFPDKSINKNLRQIDLPKSREIIKDIDATNQGRMSMSMLREFARNISIAALETPELRNVLINEKFDAVVTEWFFSDLEAGFSRQDSTAVEAHYDKQFSSIAKARGVSLPPLSISRHNISIMLVNSHTSFAPAQPLPPNVIEIAGYHIEETTPPLPKDLQDLLDSSRNGVVYFSMGSVLKSAALPESTKRELLRVLGSLPYTVLWKFEDQLEGLPKNVHIRSWMPQASILAHPNVKVFITHGGLLSTLEALRYGVPLLAIPVFGDQPGNAIRAMRSGYARKVTFSPDMAPELERELKHMLADDTYYKKAKELSKLFNNRPVTQRKLIRHYIELAIDTKGAYHLRSKSQLYKWYELWMLDQLAVVVTALLFIYLLLKKIVSVFTKKNVKEVKKSKKNK

SEQ ID NO: 7244 - protein, 495 aa, Trichogramma pretiosum
MKSHFAMNEQLMKGLAAKGHQVDVYSHFPLDKPIENYREFTIVDPLVANFTNNLNRDLLNSWMSSNFIPIREIMNTLGESNCQQLGRKEFQKLIETYRNKNSTYDVIVMQPYVAACFLAFGRYLNLPIVTVETLRMTDWTYSSFGSPHYPAIMSSAYAGFSAPMSFWERVKNFLITNYMHYGFYWLVKNQDEYVKQYFGDDYPSTGELLKDVDLMLINYNQMLHGVRPYTPAIVPVGGLHIDTSERKLSEKVQKFLDDSENGFVYFSFGSMVRIETFPEHILKIFYDAFRKIAPIRVLWKIAKPEELPSGLPDNVLTDTWLPQMEVLKHKNIRAFITHGGLMGTMEAIYNAVPMIGVPLFVDQYANMDLYQKRKIAVSLDYYKINNESFIQALEEILENPNYKKEIAKLSQSFRDTPMSPLDTAAYWIEFIARNGKKSLRSPLVDMPWWQTSILDVYMFVAVVIFLIVSLVAIIVQKFKRLLLRCMNKSKKIKVN

SEQ ID NO: 7245 - protein, 525 aa, Solenopsis invicta
MKVLLSVLLTILACDQAANGLRILGLFPLHGKSHWIMQEALMKELAKRGHQVDVVTHFPLKKPIPNYKDISLEGSLPSVVNNMSAVEVLRFQTPNVAYLVQMAGTQLCELLNHPKLQELIKNPPQDPPYDLIVTESFAAPCFLAFGRHLKVPIIATVASVFHDWLNEVSGNPANPAFVPSFFSTHSSSMNFKERLTNAFLSNYLSWQFHYHSNKQVAIVKEHFGLDLSCIKDLYNDIAVYLVNSHHSLNGIRPMTTSVIEIGGMHLKDDNPPSPEVQKWLDESKDGCIYFTFGSMVRIETFPKETVQQFYAAFEKIAPVRVLMKVAKKEDLLPGLPKNVMTQSWFPQISVLKHKNIRAFITHGGVFSTQEAIYTAVPMIGVPLFGDQAINIQNYVNKKVAVSLDIRNITEAKVTSALNTILKDPSYSENIRKLSNKFLDRPLSAMDTSVYWIEYIGKYGNVLRSPALDLYWWQRELLDVYAFIFGIMAVGLYVVLFILCKIKKCLCGSRTCAKKDSAAMKSKKNK

SEQ ID NO: 7246 - protein, 533 aa, Mesocricetus auratus
MAMGLQVSLQGLSGLVLLLCSLPWAESGKVLVIPMEGSHWLSMKTIVRELHARGHETVVLAPDVSVYIKEDDFFTLKSYAVPYTKEEYEHNLLSLLQMFFENEYSVTMFLSNMELMKNISAFYVRSCTSLLHNTGLIQHLNSSSYEVVLTDPEYPCGALLAKYLNIPAVFLLRFIPSDVEFEAAQCPSPPSYVPRLLTRNSDHMSFLERVKNILYNLPFKIIFHFSYIPYESLALDLLQRQVSFMEILSHASIWLLRFDFVFEYPRPIMPNMFFVGGMNCAIRKPLSQEFEAYVNASGEHGIVIFSLGSMVSEIPEKKAMEIAEALGRIPQTVLWRYTGPKPSNLAKNTILVKWLPQNDLLGHPKTRAFITHSGSHGIYEGICNGVPMVMMPLFGDQMDNAKRMETRGAGVSLNVLEMTVDDLENALKKVINDKSYKENIMRLSRLHKDRPIEPLDLAVFWVEYVMRHKGAPHLRPAAHDLTWYQYHSLDVIGFLLAIVLTVVFIVFKCCAYGFRKCFGKKGRVKKSHKSKTH

SEQ ID NO: 7247 - protein, 1553 aa, Caenorhabditis remanei
  MOD_RES (819)..(819): Any amino acid
MNVKFLISVSLLVLFNSTDASKILIFNPIFGFSHVKFISKLADIIAEHGHNVTLFQPYHNAMKNVEGLVKNKNIEILNYYPTHYDELLKKETQTFSIFWDSQLIGNPVLGAFMLPFVLGGEFKKTSMDLAHLLDVPCIPMMSTVRYPIFNGLFGQPSFLGTVPQQGSLGAPEAGFLDRLNDIYRFIFTGIAQERLNKYQNDFIQEAIGRPVPNWKDLVSQSPIFITNSNPYLDYAVPTTAAIVHVGGITMNLDKMKNTGKLPEEYENILKERESTILLSFGSVIRSYEMPENFKAGIIQMFESLPDVTFIWKYEKDDVEFQKRLPKNVHLRKWVPQPALLADERVKVFVTHGGLGSIMEVAYSGKPAIVVPIFGDQSHNAMMLARHGGAVAYDKFDLQYGQKLAGVITELISNPKYKENAKMLLEVLVNQPIDPKINFLNHLDFAIKFPALRSQVPAIQHVGWIAHYYLDALTLFQPFHIPLKNMDGLVKNKNIEILNYYPDHYDELLNTESPTFPMFWDSHLMNNPVLQSVMMPRMIVKELQRTDEQILLDTKLHETLKNKKFDVAIAETFGISGFYLAHFLDLPCIPVMSAVRFQVFNELTGYIPQIGSKRASEAGFLDRLNDVYMKFFDKITVEKMGQLQNDNFENALGRPLPNWKDLISESPVYITNSNPYLDFAVPTTATIVHAGGITIDLKKLRNVGPLPEEYEQILQERDSTILISFGSVIRSYQMPDNFKAGIIQMFESLPDVTFIWKYEKDDVEFQKRLPKNVHLKKWVPQPALLADKRLKVFVTHGGLGSTMEVAYTGKPALMVPIFGXQPQNAYMLERHGGAIAYDKFDLQDGDKLTKIMKDMVTNPKYNENAHALLEVLSNQPIDPKMNLMKHLDFAIKFPKLRSQVPAISHVGIIAHYYLDLLSFLSFSLLGFSSGKNILMFNPMFGFSHVKFVSFMADVIADHGHNVTLFQPFHNAMKNTEGLVKNKNIEIINYYPNHYDELVNLETQTFPMFWDSHLMNNPILQAFMMPRALAGEFERTSVHIAHLLEIPAIPIMSSVRFPCFNDLFGQPSGLGYYPHIGSKMAPEAGFLDRLNDIYRNFFMYVMMHRMANIQNDYVENAIGRPVPNWKDLVSRSPIFITNSNPYLDYAVPTTAAIVHAGGITMDLKKMKHVGKLPEEYVPILDERESTVLISFGSVIRSFQMPENFKAGIIQMFESLPDVTFIWKYEKDDVEFQKRLPKNVHLKKWVPQPALLADERVKVFVTHGGLGSTMEVAYSGKPALMVPIFGDQPLNAYMLERHGGAIAYDKFDLADGYKLTKTLKDMVSNPKYFKNAKELLEVLSNQPIDPKLNLIKHLEFAMQFPNLRAQVPAINHVGIIAHYYLDAIAFLVFVGGLTVYIGFLILLGIEVSGKNILIYNSVFGYSHVKFISLMANIIADHGHNVTLFQPYHILHNTEGLVKNKNIEIIDYFPDHYDELVNAEAETFPMFWDDPLVNHPILETIIAPKLISGAIERTATQLFKDQEVLNQLKSKKFDVVIAETFELTGTLPIFLMFHVFP

SEQ ID NO: 7248 - protein, 490 aa, Photinus pyralis
MFACVAVISFAVLLGVGDSAKILGVVPTPSISHQVVFQPFFRELSLRGHEVTALTTDPMRDPKLSNLTEIDLHFSYRIWNEHIMKNALKFKTNPIGATIDFYKSTIDIQDEQLRHPSVQALIRGEEKFDLIIIESIMPALFGFVHKFKCPYIMMFSQEAPSDYYKLMGNPTHPILYPDAIFQYDQQLPFPQRLLAVLTMPLFPLFARYIFSMHDHLVQNHFGDDYPSIVELMSKPDMLFVHTDQIFHKELKNKLDNAEHGFVYFSLGSNVKSKDLPPELLDTILSTFAELPYTILWKFEGAHLDGLSDNVITSPWLPQQDVLRHPNIKLFITQGGLQSLEEAMYSGVPILGVPFYGDQTGNVKRMEIGGTGLIVDYATVTKDEFKAKILEVAQNTRFRNKAKELAALAQDQPMTGLERAVWWTEYVIRHKGASHLRSPLLDVPWYQYLLLDVLAVIASVMVIVGLLVFYIVRWFIGLLTCRRKKNEKKIQ

SEQ ID NO: 7249 - protein, 520 aa, Spodoptera litura
MLSFVYVITFSAFLVNQSETARILAMFPVASISHQVVFRPLTQELVRRGHEVTVITPDPAFPKAEAPANLTEIDVHDISYELWNSIFLDTRKDNKGDVIFAIKKIYEAITAIVDAQFQDERVRNIIDDKSKQFDLILVEAMVRPTLVLSNIFKAPLIQISSFGGVIDTYENMGASIHPFLYPSITRQRLHNLTLLEKIKELYSYYQINRIYKNNEVNENKVLRKNFGDQVPTIAELKNNVDMLFININPIFEGIRPVPPSVIYMGGLHQKPNKDLPAELQSYLDSSKTGVIYISFGSNVDPTLLPADRIEVLVKTLSQMPYDVLWKWNGDVLPGRTDNIRIAKWLPQQDLLRHPKIKLFITQAGLQSTDEAISGGVPMIAFPMFADQPYNAEKYEFFKIGIKLNLDKLTVEQFTGVIKTVIEDKSYKKNVEKLRSVMYDQPQSPLERAVWWTEHVLRHGGARHLRGPAANMSWVEYLELELVFTVLLGLFVILLVLVYIIRVIVKAIFSSIVSTPKVKKN

SEQ ID NO: 7250 - protein, 533 aa, Ovis aries
MALGLQLRRQVLAGLLLCLCVGRWAEAGKVLVVPMEGSHWLSMREAVRELHARGHQAVVVAPEVNMHIKAEDFFTMKTYGIPYTQEKLDSLMKTHVQLLFEKVHWVTLFLKSMASLKNASLLFERSCEGLLYNKDLIRNLNASSFDVVLTDPVHPCGAVLAKYLSIPAVFFLRQIPCDLDVEGTACPNPFSYVPRLLTMNPDRMTFFQRVKNMLYPLALKYICQVVFTPYARMASELLQREVSLGEILASGSVWLFRGDFVMDYPRPIMPNMVFIGGINCANRKPLSQEFEAYVNASGEHGIVIFSLGSMVSEIPEQKAMEIADALGKIPQTVLWRYTGTPPPNLAKNTKLVKWLPQNDLLGHPKTRAFITHSGSHGVYEGICNGVPMVMMPLFGDQMDNAKRMETRGAGITLNVLEMSSGDLENALKAVINEKSYKENIMRLSRLHKDRPIEPLDLAVFWVEFVMRHKGASHLRPAAHDLTWYQYHSLDVIGFLLAVTLTVIFITFKACAFTFRKCFGKKERVKKSHKSKTH

SEQ ID NO: 7251 - protein, 943 aa, Caenorhabditis briggsae
MDIHMIIITFFINLLFLHIVESARVLLTVMDQGRSHATSINTFMHRLQKDNHTTALEFAWFHPDIDFGMDERFIDMKGFDNPFASPDFDKIAFEEDYSFIHQAVAYGFGSKTCDNILKHKKERFNEILSEDWDLYLSDSLFAVCGYGMAEISGKPHVMMHSTDLESAQGSFKAFSRNYATFVPSNLPFTMLDFSVTKYFHRIWAAYDWFGSFIFTAFVGNFAQKWALRSIIPFPYFSFSEYNRRSSYSFTDMPDSLFPPASRTNDFFSFGAYCKPSSTPLPSDFLSFIDDPKSKGTILIAFGTFIDWRRAPKHYYDTFSTIVNQLTDYRVIWSMKGERPPGLRDHVKTSSWVPQNQILHHNKTVLFLSHGGLKSTKEVICSATPTIFVPMFGEQTRNSWLIKEKGFGRIMNKFNINVKELGTHVREVLEHPTYQDKANKFLTYYMDQPIPTLDEGAFRFSKLLKYGGRMPAFFYPRALDLSHITVLNLDLAILVFFFDGTKRQNLEKLVGWLRLQFRNHITASVETALQMVLRSELLFQLNRYLGGLLRFRNGNGGRSMYVDCLVDTPDNEEARLEINEGVRREIPRIDRPIAENRGRMTTEYYEDISPPTRQPVPEPVDSFDQKMARNLNSAVTYVGPARRFGPSLVPREESATDYFVADVPSTSSSFPDWPALSNPQPHCSRQPDPAASNSSHTLPPRTQCAERVQTPLTESDVIQEYDQFSEDDEPTLGDDLESLTPIRENIPPLQNVPMESQRAPRNADIRDNNANDSEKTIPHNQSDSESYEIFSEFQSISALILPKELMEGVYKSLAKNDVPEKSHDQQAEFIMGKLFPKRSPPVNASMYRTGDNKVLGFQNSDTHRIWLTPIENQVIFLNGKLVACEPRKLGICEICASYKFSNHETLRCDSCKRVFHAKCFAVRAQRKGKCICRARLCPEKNPYV

SEQ ID NO: 7252 - protein, 519 aa, Trichoplusia ni
MRILCLLTCFILTVHTNEAARILAVIPTPSISHQVVFRPLIQELAKRGHDVTIITTDPAFPKGGAPANLTEIDVHDISYQLYEQILTDMPRGKKNDIQSQTAAFTSFIAKAVDIQLSDEGVRKLIEDKNQKFDLLILEAWVRPALVFTYIYDAPVILMSSFGALFDNDAMVGTPTHPILYPTVFRQRLNNLTMWEKITEMYSHYRIQNAFYELRHFEDKILQKHFGPNIPSVMELSNNVDMLFLNLYPVFEGIRPVPPNVIYTGGLHQNPVKDLPQDLKSYLDSSKNGVIYISFGTNVDPTLLPADRIQVLVKAFSELPYDVLWKWNGDELPGRTENIRISKWLPQSDLLRHPKIKLFVTQGGLQSTDEAISAGVPLIGVPMLGDQWFNVERYVYHKIGVRLDLDDITVENFKSNIHKVIGDESYRQNTIKLRGFMRDEIQTPLERAVWWTEYVLRHGGAKHLRSPAANISWAEYLELELVLTLLAGLFVIVTAFVFILLTLYKHFLKKFLGTIKVKRA

SEQ ID NO: 7253 - protein, 531 aa, Galeopterus variegatus
MACLLGAFQRSSAGVFFLALWGMVVGDKLLVVPLDGSHWLSMKHIVEVLSVRGHEIVVLVPEVNLLLRESKYYTREIYPVPYFQEELKNRFSSFENSLFAERSFLTAAQKEYRNSMIVLELSFINCQSLLKDRATLNFLKESKFDALFTDPALPCGVILAEYLGLPSVYLFRGFPCSLEYAFTRTPNPVSYVPRCYTEFTDHMTFPQRVANFLVSLLENYLFHCLYSKYGELALDVLEREVHLPTLYQNGSVWLLRYDFVFEYPRPVMPNMVFIGGTNCRKSRDLSQEFEAYVNASGEHGIVVFSLGSMVSEIPEKKAMAIADALGKIPQTVLWRYTGPRPSNLANNTILVKWLPQNDLLGHPKTRAFITHSGSHGIYEGICNGVPMVMMPLFGDQMDNAKRMETKGAGVTLNVLEMTSEDLENALKAVINDKSYKENIMHLSSLHKDRPIEPLDLAVFWIEFVMRHKGAPHLRPAAHDLTWYQYHSLDVIGFLLAIVLTVAFIAFKCCAYGCRKCFGKKGRVKARKSKAQ

SEQ ID NO: 7254 - protein, 531 aa, Drosophila willistoni
MQPLRSKTRCISIFFLLSCLLSYATAFNYLVVLHTGARSHYNVGSALAKGLAAAGHQVTIVSPFELKKPNPNITEVSVPSILEAMKGNTDNLLETSEKPILNQILGFYEMGINITKALLEDPTIKEFKKSKQTFDAVICEVFLNEALFGFAEHFNAPLIGLGTFGAISWNTDLVGSPSPPSYIPHALLKFSDHMSLVERVGNLAFLTYEEIFMNLYYLPKQEEVYRKYFPNNKQDFYDMRKNTALVLLNQHVSLSFPRPYSPNMIEVGGMHINRKRQPLPKDIEDFINGAEHGVIYFSMGSNLKSKNLPLEKRQALIETFGKLKQRVLWKFEDTNMPGKPANVFISDWFPQDDILAHKNVIAFITHGGLLSTTESIYHGKPFVGIPIFGDQFLNMARAESNGYGVTVNFKELTTEKLTNAIERIISTPEATQKVLDMSARYKDQKELPLERAVYWVEHVSRHKGAKYLRSASQDLNFVQYHNLDAILILYGGIIFILYCLMLLIRLAFRGLQEFFINRNSKASQDKSKKRN

SEQ ID NO: 7255 - protein, 528 aa, Papilio polytes
MLNHIILLILATLASRDVGDCARILGLFPHTGKSHFMVFEPLLRALAERGHHVTTVSFFPLKNPPSNYTDVVIEGAMQDGLSSLDMSMFETSTPLMKVPLLNTILKNIFEMEMSAPLALATCKSIIRQSSVIEAFKQKYDVLIVENFNSDCMLGLAHVFGIKAPIVGISSCAIMPWTYARFGLPDNASYIPLVTTAYSSYMTFIQRLDSFISKLYVDGMYHMIQNKERSVIEKHFGVKIPDLEEIGKKQTSVLLVNTFPTLNGVRPTLPSIIEVGGMHLDHSRKVLPSYIEKFLNESEHGVVLLSFGSLIKTSTIPKYKEDIIVNALSKLKQRIIWKFEGSAEEGTLTGNILRVKWLPQYELLQHKKIIAFISHGGLLGMTEAISAGKPMVVVPFFGDQPANAEAAAVAGLATTVPYIELTKERLTKALDFVMSDETKSNAKRVSSIWRDRQADPLETAVYWTERVIRWGHHAPLHSPARDMPLYQVALLDVIATLAVAIFILLAISWYILSKVFRLLFARESKLKMH

SEQ ID NO: 7256 - protein, 446 aa, Haplochromis burtoni
MMQVSTSLPLLLLSLTLLLLHPVSPVHGGHVLAFPGEFSHWLNMRTIIEELVKRNHSVTILVPDASPSVNYNNSRDTAKFNFLVFKVSYSRQEYLDLMQELMRFSMYEAHLSSPLQKFLKTASWILHFLDFGRQQCDGMLRNKQLMATLRHTSFDVILQDSMAMCGDLVADLLSVPLIISMRFSFGSVFERHCGHAPAPPSYVPLAPLSYNDHMTLSERLINMVIYLGSSAVSELTWKLTLDQYYREIKGTPSSVCETMGKADVWLIRTFWDIETPRPTPPNFKYVGGLHCKPANQLPEDLEAFVQSSGDAGIIVASFGSMVTNLTMQHANIIATGFGQIPQKVIWRYRGEAPTALAPNTKISDWIPQNDLLGHPKTKAFVTHGGTNSLYEAVFHGVPLVGMPLFGDQPDNLARMSRLSTAIVLDFNHLTAEELAEALHVVTNQPW

SEQ ID NO: 7257 - protein, 530 aa, Cavia porcellus
MSMKWISALLLLQFFCYFSIGSCGNILVWPMEYSHWMNMKIILEELIQRGHEVTVLIPSSFIFVGVNASSGIKFETFPTSLRRDQLEQFYTRFVSKWMDIGSITTCLSYIPVMEEMFKEYSANWENVCKDVVSNKNLVTKLQQSNFDVLLADPVAPCGELVAELLKLPFVYSLRFSPGFQLEKSAGGLPFPPSYIPVLMSRLSGEMTFMERVKNMICMLYFDFWFETFNLKNWNKLYSEVLGNPTTLYKQMQKSDMWLIRSYWDLELPRPTLPNFDFVGGLHCKPAKPLPKEMENFVQSSDDHGIVVFSLGSMVSDMSEATANAIALALGQIPQKVIWRFDGRKPDTLGANTRLFKWIPQNDLLGHPKTRVFITHGGANGVFEAIYHGIPMVGIPLFGEQHDNIAYMEAKGAAVTLDFQTISTTDLLNALNKVINNTSYKHNALRLSTIHHDQPMKPLDRAVFWIEFVMRHKGAKHLRPLAQNLTWYQYHSLDVIGFLLACAATIIFLVIKCCLFFFQNFVMVGKKEKRE

SEQ ID NO: 7258 - protein, 209 aa, Macrococcus caseolyticus
GLHQKPQKELPTDLKTYLDSSKNGVVYISFGTNVQPSLLPPEKVRILIKVFSELPYDVLWKWDKDELPGRTSNIRISKWLPQSDLLRHPKIKVFITQGGLQSTDEAITAGVPLIGVPMLGDQWYNVEKYVRHEIGVRLDIETLTEEQFNNAITQVIGDKKYRQNIKKFGQIIRDTPIDPLENAVWWTEHVLRHGGARHLRSPAANMSWT

SEQ ID NO: 7259 - protein, 513 aa, Buzura suppressaria
MYLLIIFLWLAKQCHGAKILAVMPTPSYSHQSVFKVYIESLAERGHTIVIIKPTTRVFYDDRFSDNITEIDATMSEFYFSELFTNASVFRKRGIVADSKTVTSANYLGLVHMISNQFKLPAVKQLIEHRHRLQFDVLITEAFIDYPLVFSYLFGDLPIIQISSGHGVAENFETMGAVSRHPLYYPNMWRDRFTNLNVWETINEIYMEMRLQNEFSLLAEEQNKLLAHQFGIGVPTVQKLRDRVQLLLVNTHAVFDNNRPVPPSVQYMGGLHLHKKTIKPMSNYVQNFLDNSTRGVVYVSFGSSITSKNMAPEFLSMIIETFKLVPYDIAWKFDIVPEVNNLPENVLIQDWYDQYSVLHHVNVKVFVTQGGVQSTDEAIDALVPLVGVPMMGDQFFHTNKYAELSIGCAVDTLTVNSLQLMRAIVDAATSAKYRNGLRHLRQIINHQPMTPLHKAIWYTEHVIRHGKNDNTWLKTKAANVGYSDYFMMYILFPLVSVTAMNQLQQLMRLTFFSM

SEQ ID NO: 7260 - protein, 518 aa, Spodoptera litura
MTSTVLLVLLTLTLSLTSNDAAKILGFFPLPSISHQVLFRHLTQELAKRGHEVTVITTDVAFPNGDGPANLTEIDVHDFSYEQWRNLYKLTSTGEKDLIGQIHGAYHMLVKIVEMQLKVDKVQKMLKEEKFDLLLLEACVRPALLLSHVVKAPVIQVSSLGTIDYNVATIGSAWHPFLYPDSLSQRSYNLSIWEKIRELYTYYQLNRVMQEVEDAENVMAKKLFGPNVPTISELKNNVDLMLLNTYPLWDNNRPVPPSVVYMGGLHQNPQKELPKDLKEYLDSSKNGVVYISFGTNVQPSLLPQDRVQMMAKVFSQLPYDVLWKWDKDELPGRSKNIKISKWLPQSDLLRHPNIKVFITQGGLQSADEAITAGVPLIGVPMLGDQWYNVEKYVHHGIGLQLDLLSMTEDDFKNAILTIVNNDSFRQNIKKLRSVMHDQPQPPLERAVWWTEHVLRHGGARHLRGPAANMSWADYLELELVFTVLAVLLGVTLVLFYLMYSIWKYFSNTISPSKKLKKN

SEQ ID NO: 7261 - protein, 405 aa, Bicyclus anynana
MLFHNINVVAAVLSALLLLAGYTESANILHVIPFSAMSHYIFLRHIGLELAQRGHNVTVITTHKEKNPPSNYHQVQVQKKQIWELIGGERPNIFDMAELSSEEFHHKVVWPGGLAFTELTLNSSDVQEFLKKDNTFDLVICEQFVQEALYTLASKYNAPLDLQKLLDESKHGVVYMSFGSNIRSAELPEHKKKAFLNVFKELKQTVLWKWEEDVLEGKPKNLFTGKWLPQQEIIAHPNIKLFITHGGLIGMQEAIYNGVPIVGVPIFSDQYNNVLLAEEVGVGKLLHYNDFNEDTLNKTINEILNNDSYLKTAREVQKRWNDRPMSPLDTTIFWLEYVIRNKGAEYMKNPARNMSWFEYTMLDVYAFILLIIVAVLAFFVKLILIVRAIVYGKQTNKMTKRKKRL

SEQ ID NO: 7262 - protein, 531 aa, Cavia porcellus
MAPVPSPALLPLCLCLLLASSFAQAGRLLVVPMDGSHWFTLRSVVEKLIQRGHEVVIVMPEVSWQLGRSLNFTVKTYPTSFTVQDLDQAFRLFADTQWKTPEQSMYSIAAGSCKRFFDITFSRCRSLFNAKKIVEYLKKSSFDAVLTDPFDVCGLIVAKYFSLPSVIFARTVFCHLLEEGTQCPSALSYVPRLLSALSHVMPFKERVQNIFIHLEERLFCNYFYKNALEIAAEILQRPVSTYDLFSQASVWLLRTDFVFDFPRPVMPNMVFVGGINCQEEKKPLPMEFEAYVNASGEHGVVVFSLGSMVSEIPEKKAMAIAEGLGKIPQTVLWRYTGTPPSNLAKNTILVKWLPQNDLLGHPKTRAFITHAGSHGVYEGICNGVPMVMMPLFGDQMDNAKRMETRGAGVTLNVLEMTSDDIADALKKVIYDKSYKDNIMRLSSLHKDRPIEPLDLAVFWVEFVMRHKGAPHLRPAAHDLTWYQYHSLDVIGFLLGIVLLVAFISFKCCAYGFRKCFGKKEQRKKTQKSKTH

SEQ ID NO: 7263 - protein, 516 aa, Papilio machaon
  MOD_RES (332)..(332): Any amino acid
MTPRLSILYLLCLTLPFIENARILGVFPTPSISHQVVFRPLVHELARRGHELFVITTDPVHPNGPGNLTEIDVHDLSYTRWNKGMSKIEDGSRDVTKQMEAMEQIKYEIFEEQVKSKSVQKLLSYEHDHFDLILAEAYVGYTLGFSHVFKAPVILVSSFGGVWDNYDAMGAPTHPLLYPSMLRDRLNNITMWEKIIQLKKEHKMRHLARNYEKMNKFLKKVFGAGTPPVQKLFDNVAMLFLNVHPIWDSNRPVPPGVIYMGGLHQNPIRDLPKDVKLYLDSSKNGVIYFSLGTNVKPSHVPPEKLQAIINVFSRLPYDVLWKWDNDELPSRXNNIKISKWLPQSDLLRHPKVKLFITQGGLQSTDEAITAGVPLIGIPLLGDQWYNVEKYVQHKIGVRIDINSLTEEMFENAIHNVINDKSYRENIVRLRSIMQDQPQSPLERAVWWTEHVLRHGGARHLRSPAANISWTQYLELELLFTLATVLILSLIILFLVIKMVWSFVNSNVTTKMKIKKP

SEQ ID NO: 7264 - protein, 515 aa, Wasmannia auropunctata
MKITTTSLVTIVCLLSMVNGARILAIFPFNVKSHYIVFEPLLKRLSARGHEIVAVTHFPQRIRLANFTDVDVSSALPSRINTIPLINITIWQSILRFMSSEFCEFVLSHPEIKRIINAKEHFDLLVIEMFASDCFLGIAHALNISKIVGAISSAGLLRTNVMLRNPENPSYIPNYFSSYTGRMNLLERSFNTVLLLIVNSGFRILSDRSSYEVARKYLGHDLPDFDALRSRISLILTNGHPAVSVARPLAPGVKEIGGIHIPISGPKPLPMDLQDYLDSQSRNGVIYFSLGSQIDTSTIPNQVFAALYRAFEQVPQQILWTCAKERMPPLPGNVKCIGWAPQLSVLCHSNTRLLIYHGGLLGLQEAIYCGVPILGIPVFGDHRLNMAYVVEKGLALQLDLQQFSYKRFSSSLNEILSNKSYTEMARKASFQFKDRLMSPVEEATYWVEHTIRHDPNFLKTAAIELTWYEYLLLDVALMMISIIVFALWLICKLFSLLFSKKKIIIIIEDNVKKIK

SEQ ID NO: 7265 - protein, 449 aa, Homo sapiens
MPQDRTEENEIFVDLALNVLPGLSTWQSVIKLNDFFVEIRGTLKMMCESFIYNQTLMKKLQETNYDVMLIDPVIPCGDLMAELLAVPFVLTLRISVGGNMERSCGKLPAPLSYVPVPMTGLTDRMTFLERVKNSMLSVLFHFWIQDYDYHFWEEFYSKALGRPTTLCETVGKAEIWLIRTYWDFEFPQPYQPNFEFVGGLHCKPAKALPKEMENFVQSSGEDGIVVFSLGSLFQNVTEEKANIIASALAQIPQKVLWRYKGKKPSTLGANTRLYDWIPQNDLLGHPKTKAFITHGGMNGIYEAIYHGVPMVGVPIFGDQLDNIAHMKAKGAAVEINFKTMTSEDLLRALRTVITDSSYKENAMRLSRIHHDQPVKPLDRAVFWIEFVMRHKGAKHLRSAAHDLTWFQHYSIDVIGFLLACVATAIFLFTKCFLFSCQKFNKTRKIEKRE

SEQ ID NO: 7266 - protein, 506 aa, Camponotus floridanus
MRMLKIMFLWSFCLSVCHGYRLLGLFPFHGKSHFVMFEQLMKGLARKGHQIDVISTFPLKKPYPNYTDIVKLTPPHVFVNNVSYEFMQVLLSANPVYSIATMAGNDICKHLENPAIQELARNPPKDPPYDAVLMEVFGAQCFAIFPYLWDVPLIAVSTTALYPWLPPLIAQPENLAFVPNNKNQKTWLSKLYFNYLTREQSEIIRKHFGPNLPGIRELETKIALMLINSHFALNGIQPKTPAAVDVGGLHIQDEDSTLQPELEEWINDSKDGFIYFTFGSMVMIETFPREFLNILYASLSKIAPIRVLMKIPNPEKLPPGVPKNIYMSPWMPQIKILKHPKIRAFITHGGLLGTLEAIAYGVPMIGIPLFADQFMNIDAYVARNIAVKLDLHKMTEKDMDRALNAILWDPIYKETVRNFSQIFLDRPLNALDTAIYWIEYVIKYGSNVLRSPAMDLTWWELSLLDVFAFLLFCAAIIIMTVVFIVNFLLKILNGNDHNSLHSKKNN

SEQ ID NO: 7267 - protein, 502 aa, Oryctolagus cuniculus
AAAMDFSHWINLKVILEELQLRGHEITVLVPSPSLLLDHTKIPFNVEVLQLQVTKETLMEELNTVLYMSSFELPTLSWWKVLGKMVEMGKQFSKNLRRVCDSAITNKELLDRLKAAKFDICLADPLAFCGELVAELLNIPFVYSFRFSIGNIIERSCAGLPTPSSYVPGSTSGLTDNMSFVQRLKNWLLYLMNDMMFSHFMLSEWDEYYSKVLGRRTTICEIMGKAEMWLIRSYWDFEFPRPFLPNFEYVGGLHCKPAKPLPEELEEFVQSSGNDGVVVFTLGSMIQNLTEERSNLIASALAQIPQKVLWRYTGKKPATLGPNTRLFEWIPQNDLLGHPKTRAFITHGGTNGLYEAIYHGVPMVGIPLFGDQPDNIARVKAKGAAVDVDLRIMTTSSLLKALKDVINNPSYKENAMKLSRIHHDQPLKPLDRAVFWIEFVMRHKGARHLRVAAHDLTWFQYYSLDVVVFLLTCVATIIFLAKKCCLFFYRRFCKTGNKRKRE

SEQ ID NO: 7268 - protein, 484 aa, Dufourea novaeangliae
MFEALCKGLLRNGHRIDMISHFPSAAPISNYTDVIDLTGTRDHVVNSFSIDHGTSLQKSMTYNIATEFGGDLCHLMGHETMQKFIENPPNDPPYDLVITEYLGAVCYLGFGHLLRVPVAIASSFLQVPCIHDFMGNNHNYAFFSGAYNEGATLVTFPDRLWNFLSNFMEMQLFYYYTSDQTKVMRKYLGQDVPDVRELERTVALALVNGHHSVNGVRPITPAIVDVGGLHVEFDHSELTRDLKIWLDSANDGVVYFTFGSLTNIETLPRDTLLDLYASFAKVTPVKVLMRCANASKLPPGLPSNVLIKPWFPQVPILGHKNTRVFITHGGLMGVQEALYYGVPLIGIPIFSDQMRNINIFVEKNVAIAINLNNLTKNSMDAALNAILNDPKYKEAAQKASRSFRDRPMSAMDTAIYWIEYVIRNGPESLRSPMIGIPWWKRNLIDVLGFIVSYLVLCVYVSRIFFKASIRKLYGSTHQAKKKLN

SEQ ID NO: 7269 - protein, 884 aa, Bicyclus anynana
MLSGIHGARILAYFPTPSISHQLVFRPLTQALAARGHEVIVVTTDPVFPKGQTPANLTEIDVHDISYEIWGSLYKYHRGNKRELLVQVKAFFEVFTNVFYRQAQTTEVKELLNKDRKYFDLLLLEACNRGLMGFSHIYDAPVITISSFGAVPAQYHTMGAPVHPILYPTAGRQRLYKLSLLEKCIEMLGYYLFDFLVSDSNAYEHKIMKSIFGEDVPTFPELKNNVELLFLNEHPIWADNHPVPPSIQYIGGIHETKYKDLPADLKKYLDSSKNGVIYVSFGTNVLPSLLPPEKIEIMAKVLSQLPYDILWKYDKDVLPIQSKNINISKWFPQPDLLRHPKIKLFITQGGLQSTDEAINSEVPMLGIPMLIDQWYNVEKYVHHNIGLQLDIMTLTEEEFKQSIEKIINDESYKKNITRLKTLMREHPLKPLDNAVWWTEHIIKYGGNHLKSPAADMSWTEYYEVELVLILFAILITILTVLGWIMKSVLKFMYNIYRTNIKLKNTKIVIVQTLHVNSNTIAIFVHPAFNEKQRPANLTEIDVHDISYKIWQEYALTANGDDNNLEDKSVIFLSVIFNLFERQLIIWDNNRPVPPNLIYVGGIRDNPAHDLPKDLQSYLDKSTKGVVYMSFGSIIQTSLFSQEIIELFIDVFSKLPYNVLIKWDSELPGCPDNVKVGKWFPQTDLLRYQSMSESIDAGIPIVGIPMAADEWYNMELCLKHGIGVKLDFKYLTKQNIKGAINTVIGNECYRDNIIRLRNLIHDQPQSPLDLAVWWTEYVLRHGGATHLRSAAAHMRWTEYYEINLILCLLLLILIFTFSIIYSVKLFINKLIKQLVFIYTSGSCYRRQSVTSRRQATASPTTVSDVSAEGDGVADCSQWRLGGRQQ

SEQ ID NO: 7270 - protein, 520 aa, Spodoptera litura
MFQLSNLFAFSAFLEFAVESARILAVLPVPSISHQIVYRPLTQELASRGHEVTVITPDPAFPKGKTPPNLTEIDVHDSYKIWIATLNKIPKNKERNVLEEVKLFLELGYEVSDAELSHEDVKALIKSKKEDYFDLLIIEASETIFLGFSYIFKAPVILISSLSLSYDEIDMIGAAIHPILYTSINRIKNSHDLTPWDKMKEFYNYYKYLKMYERYEIRKHAMLKKHFGPEVPPISVLKNNIDMFFVNVNPIFEGVRPVPPSVVYIGGLHHKPNKELPVDLKAYLDTSKNGVIYISFGTNVDPTLLPGDRIEVLVKTLSQLPYDVLWKWNGDVLPGRTDNIRIAKWLPQQDLLGHPKMKLFITQGGLQSTDEAIIAGVPLIGIPMFGDQIFNVERYVYHRIGLKLDLDTLTVEQFRNAIETVLGNESYRQNVVSLRNKMYDQPQPPLERAVWWTEHVLRHVSARHLRGPAANMSWSEYLELELVFTLLLGLLTVLTLSILVMYFTWKCVLSKYLTFKIKSD

SEQ ID NO: 7271 - protein, 519 aa, Bicyclus anynana
MAITRCILFYVIVFIITGIDSARILAYFPTPSISHQIVFRQLTHALVARGHEVTVVTPDPFFPKGKSPANLTEIDVHDVSYEIWEDLLQLHRGNKQDILLQVRSLFEKFSTILDAQLQTPEVRAIFKKDRKHYDLLILEACNRAVLGFSHIFDGPVITISSFGAVPMQYGIMGAPVHPLLYPTAGRQRLYNLSFVERAVELIGYYVFDFLILDTDHYDYKIMQKNFGNNVPTYFELSNNIQLMFLNEHPFWADNHPVPPSVVYIGGIHEIKEKGLPTDIKKILDSSKHGVIYVSFGTNVLPSLLPPEKIKIMAKVLSNLPYDVLWKYDKDVLPGSSKNIKISKWFPQPDILKHPKVKLFITQGGLQSTDEAIDAAVPVIGIPMLVDQWYNVEKYVYHNIGLQLDITTLTETEFKQSVETVINDKSFKRNITRLRTILREYPIKPLDLAVWWTEHIINHGGNHLRAPAANMSTLEYYEVKLVLIIVTIFMSIIILLGWLIKSSFKLMYYLYKSNIKIKMH

SEQ ID NO: 7272 - protein, 518 aa, Ooceraea biroi
MRVLPMILVSLLWLLLCTAHRFLVVVPPLSQSHYIMLESLMKGLANKGHQIDVISPYPQKKPYPNYTDIAKWATEEYVNNVTYEFVQVLAGSNPKIFATLFGSNICEAHLGNPVIQKLVRDPPKDPPYDAMIMEVFGAHCFAAIAHLLNIPLIGVSTTTLYPWLNELIAQPENLAFVPNNFMNVEFPMNLWQRTYNVFSFLYYKAYFNYLSRSQDDLVRKYFGPNLPSVRKIKLALLLVNSHITLSEIQPMTPAVVQIGGIHIRENDLPLPHELKKWIDDSKDGFVYFTFGSMVLIETFPRKILNVFYTSLSKIAPMRVLLKVPNPEKLPPGLPENVYTFSWVPQLKVLKHPNIRAFITHGGILSILEAIANGVPMIGMPLYADQFKNVDASIARNIAVKLDIQKMAEEDMDSALNAILHDPRYMENIRNLSQRFHDQPLSPVDTANYWIEYVIKYGDDVLRSPAMDLAWWQICLIDVAACLLLCMAVIIIVAVSIMRFIVKMMNRNHRKLLHAKKTT

SEQ ID NO: 7273 - protein, 533 aa, Orcinus orca
MTAGSRGPRPLILGLLLCALGPALTQGGKLLVVPIDASRWLSPPGIVQQLQHKGHDIVVLPPHASMYVKEGAFYTLKRSPPPFRREDLEVAFINLGHPPFENDPFLQRMVKIYKKPPHDSALLFSACSHLLHNTPPMSSLAEGSFDAVLTDPFLPCGPIVAQYLAVPAVFPPHGLPCSLDFQGTQCPNPPSYVPRPLSFNSDRMTFLPPVKNILIALSESFLCNVPPPPYAPLASEVLQKDVTPPPLMSYASIWLLRSDFVNNYPRPIMPNTVFIGGINCASKKPLSQEFEAYAPPSGEHGIVVFSLGSMVSPPPEQKATEIADALGKIPQTVLWRYTGTPPPNLAKNTKLVKWLPQNDLLGHPKTRAFITHSGSHGVPPRICNGVPMVMMPLFGDQMDNAKRMETRGAGVTLDIPPMSSKDLENALKTVISDKSYKENITPPSSLHKDRPMEPLDLAVFWVEFVMRHKGAPHLRPAAHDLTWYQYYSLDVIGFLPPPVLTVIFVTFKGCAFAFPPCFGKKERVKKSHKSKAH

SEQ ID NO: 7274 - protein, 533 aa, Trichogramma pretiosum
MKSFKIIITVLLINLSISRAYKILAIFPFHAKSHDNMLSAFAKGLAERKHQVDVVTHYPAKNPPETYRIVVNLSGTEPPIINSFHIDYAKTIAQDVTVKVADRYGSDLCHYMNLPDFQKLTKKIKSSKDKLYDLVVLEAFGSSCFMGFGHLLKVPVIGISTLVEFPWISDFIGNDDNLAYVPSCSTKYFDKTKFWDRLMNLLHYHYEKFRFHSKTEKIQTELMRKYLSPDMPNVREIEKQIALTFVNRHPVIFGIKPLVPSLVELSALHMEEDPKLPDLQKWLDESNSGVVYFTFGSMVLIETLPKHQIFEIYNSLRKLNQRVLLKIADPTKLPPNLPENVLTSPWIPQQAVLKHKNVKLFITHGGLMGSQEALYYGVPMIGIPLFGDQPINVDKFVQMKMSLKIDFDNLTTNSLDWALNEIFTNYKVYKERAEYNSRLFKDRPMSPMDTAEYWIKYVIRYGAGPLKSPALELNWWQLSMLDVYIFLLIFFSVIVFFLCILIQLFFNLIKNRISIKHVSKTLSENSSKKVKYN

SEQ ID NO: 7275 - protein, 510 aa, Caenorhabditis briggsae
MHTTNLLTFLFFLGVSSGKNILIFNPIFGFSHVKFISLMADIIADHGHNVIINYYPDHYEELEKLETETFPGFWDSHLMNNPVLQAFMMPRSLVLQFERTAAQLLKDQKTLDELRSKKFDVVISETFEITGFYIAHLLELPCIPIMSAVRFTTFNELFGQPSSLGYLPAIGSNMAPEAGLFDRINDVFRNFLMLSCMERMSDLQQTFIENAIGRPVPHWRDLIKQSPIYITNSNPYLDFAVPTTATIVHVGGITMDLKQMKHVGKLPEEYVPILNERESTVLISFGSVIRSFQMPDNFKAGLIKMFQSLPDVTFIWKYEKDDVELKNKLPKNVHLKKWVPQPALLADKRVKVFVTHGGLGSTMEVAYSGKPALMIPIFGDQPWNAVMLARHGGAIAYDKFDLQDGEKLTRTMKAMITNPKYQEKAQELLEILSNQPIDPKLNLMKHLEFAMQFPNLRSQIPAINQVGIIAHYYLDAIAFIAIFAVLSVYGTYIIICKLPIRLVSKKVKSE

SEQ ID NO: 7276 - protein, 526 aa, Orussus abietinus
MAGKKMLISLLLVFGVFASGETYRILGLFAFNGKSHFVMFERLMKALASRGHQVDVASTYPLKKPYPNYTDIIVFEQPNGAWVNNLTFSTLQNDFLVFRIAPMVGHIGNDICKNMKNPDLQAIVKNPPKDPPYDLVILEIFAAHCFVAIGHKFGVPVIGVSSSDLYPWGNRLVANPENLALVPTNLAPQLDLRFFWNRLTNVIDAWIDTAEFDYETTSIQNEYIRKYVGPDVPGVRELEKTIALILVNTHISINGIKPTTPALVEVGGLHIHDDGPDLPQDLQQWLDESKDGVVYFSFGSMVRIETFPRDILLAIYQSLRKIAPVRVLMKIPDPRDLPPGLPDNVLTRPWISQLKVLNHKNVRAFVTHGGLMGTQEAIHYAVPMIGIPLFADQHLNVDFYVEKKIAVKVDYKTLTVEKMDAALNAILYDPTYRETVKELSDRFLDRPLSAVDTAVFWVEYIIRNGGDSLRSPALDLAWWQEALLDVFAVFLSAILVLIYLAYLLIRLLARILRRNRLKANLSKKNR

SEQ ID NO: 7277 - protein, 317 aa, Ancylostoma ceylanicum
MSRLLNGLLFLTVCSCYKIVIFAPEISNSQVGWNKRFAETLAKAGHDVTVILLQSMEDAEKDVQFSKDVKVGRRGTDSAMEADRIDSIFLNFWVTAHLLTALDPCPGVSRLLDADPPLPHHGTQLQVMVNSNELYELPRPTLSKVVHIGGLGVEYEDAKPLQGEFKQIADSGKGVVVMSFGSVAHAEMMPEQWKTAFLNAFAQYPEHEFVIKYANDDLKHRLPPNVHTYRWLPQADLLLHPSTKAFISHGGYNSIQESINFGVPLITIPLFGDQFKNSKIAAKHGFAVNLKKGTLDEASIAAALKEVLNNETNIKEF

SEQ ID NO: 7278 - protein, 526 aa, Leptinotarsa decemlineata
MDLLHYYISFAAIFLVVPIESANILAITFVPSVSHQEVYQPIWRELSLRGHNVTVMTTNVLADPSLVNLTQIDVSFVYKYMNVPLKSFRDATILQNIFFIDFFFSKLLQAEIAHEDVQKLLQRDDDEFDLVVLEALHPLVYGFAAKFKAPVVAISTLEPFIPFHDALGNPTHPVLRPDNFIHFYGEPTLKDRMTSFLHNIFYRAIYYWRLLPEADKVARKFFGRNIPYLGDVIGNTSLMLINSNPILNTPVANVPSVISFGNVHIKEAKPLPKDIQKFLDASSRGVVYFSLGSNVKSTSLGTEMRDIITQALSELPFNVIWKWEEDELPGKPDNVLLKKWLPQQEVLRHPNVKVFVTQGGLQSIEQSIAFGVPMVGIPIYGDQPTNVKTLVDGGMALFIDFKSITKDELKKAILEVGTNIKYRERVVKARELIQDQPMNGLDKAVWWIEHVIRHKGARHLRSPAADMPIFQYFMVDVIAILLFGLYLSVKLTKLIIRWTVRGLTIGFEVFKKFLNNKLLASKQKAS

SEQ ID NO: 7279 - protein, 520 aa, Drosophila mojavensis
MPISRLFISLLFCVLPQLLEGARILAIFPFPGPSQYINVVPYLKGLAARGHQVTSVNAFPQKKPVENFHDIVVPEVFQSYEEIIADLEISRNSWEENSFVNDFFLSVTKTVLQNAKVQQELLQPGKAQFDLIIVEALRTDALYGFAAHFNAPIIGISTFGTDWNIDELVGNTSPISYIPLITGGLTDHMTYWERVHNFVETAIAWLNWKLVYVPLHVKLYEQYFPHIAHKKPLVELSKNFSLVLLNQHFSLSFPRPYVPNMIEVGGLHIAHKPAPLPKEMEEFIQGAGSTGVIYFSLGSNIKSKDLPEERKQMLLQALASLPQRVLWKFEDEQLPNKPPNVFISKWFPQPDILAHPNVKLFITHGGLLSTIESIHHGKPVLGLPFFYDQFLNVERAKQAGFGLALDHKQMTGAEFVQTIKRLINEPKFSETAKLMSARYRDQPMSPQETAIWWTEYVLRHKGAPHMRIAAQDLSFVAYHSLDVVGLLLGVAVLMLVIIFYLLQRLLCSRGGAGKQKLKNQ

SEQ ID NO: 7280 - protein, 512 aa, Papilio xuthus
MKTTVLLWMFLTISSISAYKILCILPAPSRSHATLGRGIVNTLLEAGHQVTWATAYLDKSNNKNLRQIEISKSRDVVEGMDVTNQGRMSVSLVREFARNISIAALETSELRDVLINEKFDAVVTEWFFSDVEAGYAAVQQVPWILLSGVVMHPYLEYLVDSVRSLPVTPFMMNDFPVPMDLWDRLANTYSFGMFMFGNWLESTTSEGDYEKHFSSIAKARGVSLPPLSLARHNISILLVNSHSSFAPAQPLPPNVIEIAGYHIEETTPTLPKDLQDLLDSSRNGVVYFSMGSVIKSAALPDSTKRELLRVLGSIPYTVLWKFEEQLEGLPKNVHIRSWMPQASILAHPNVKLFITHGGLLSTLESLRYGVPLLAIPVFGDQPGNAIRAMRSGYARKVNFSPDMAPELEKELKHMLSDDTYYNKAKELSMLFNSRPVTQRKLILHYVELAIESKGAYHLRSKSQLYKWYELWMLDQLAVVFAALFLLYLLLKKIVSVLTKKNVKEVKKSKKNK

SEQ ID NO: 7281 - protein, 530 aa, Caenorhabditis briggsae
MHLNYIFHIFLLLISVHAKNILIYNSVFGYSHVKFLSLMANIIADHGHNVTLFRPYHINHNTEGLIKNKNIEIIDYFPDHYEELLHANSETFPMFWDDPFVNHPVLEAFIAPRLISQAVEKTATQLLKDGNIIQELKAKKYDVVIAELFEITGVYIAHLIDVPCIPIMPAVRFTNTMDIFGQPSLLGYIQHSGSKMAPDAGFLDRLNDVYRNFLFDLNTDLNSYHQQKVFEKAVGKSLPSWKDLVKQSPIYMTNSNPYLDFAVPTTATIVHVGGITVDLNKPKTVLSDDYEKILQERESTVLISFGSVIRSFQMPDNFKAGIIKMFESLPDVTFIWKHEKDDAEFQKRLPKNVHLKKWVPQPALLADKRLKAFVTHGGLGSTTEVAYSGKPALMVPIFGDQPYNADMLARHGGAIAFSKYDLKNPEKLTSAVKSLVYDLKYKNNAEILLDVLSNQPIDPKLNLMKHLEFAMKFPNLRSQVPAINQVGIISHYYLDVIAFLTILVVLSLYVFYVLLRKFFRRVVSGKLKNE

SEQ ID NO: 7282 - protein, 1056 aa, Spodoptera litura
MSLVNLLAVVACFALSVPSNDGARILGFFPFPSISHQVVFRPLMHELARRGHDVTVITPDPAFPKGGTPANFTEIDVHDASYRLWHEQFVATPKGQKGNLVKDFNIIYKLTVKIIDTQLKDAEVQRLLNDKNQTFDLVIVEAMMRPAVVLSHIYKAPVILMSSFGTFSDNYAVMGAPIHPFLYPFTVSRRLHSTSLWDKIGHLYDYIMIEMIHRNNYIEENRMLRSHFGPDLPLIEEINNNVAMMFLNLYPVFEGNHPVPPSVIHMGGIHQIPDKPLPQELKSYLDSSKNGVIYVSFGTNVDPALFPPEKIATFVRTFSRLPYDVLWKWNKDELPGKTDNIKISKWLPQSDLLKHPKIKAFITQGGLQSTDEAITAGVPLIGVPMYGDQWYDVVKYEKLKIGVKLELDTINDEDLENAIHKVIDDDSYRRNIKKLRELMTDEPMSPLERVVWWTEHVLRHGGASHLRGPAANMSWTEYLELELVLTLLLALIITTATIVLLAKYIYDKVLRKYVDVIKIKRATLFNSRLQSSRSRTMALPLFIVTCFTLAFVPNEAARILGVFPVPSISHQVVFRSITQELARRGHELVIITPDPAFPKGKTPANLTEIDVHDVAYKMWRDDIQDIAIGEIHGILSEYAIIMKLMAKVLDVELKEEQVQKLLNDKSQKFDLILAEACVRSAVVFSHIYKAPVILISSFGPFLDNYNVMGAPSHPLLYANNMSRRFNNLTMWDKIVKLYYRYNIEVMLNKNYAYENNMLRSHFGPDLPPIEEMYNNVAMFFLNLHPIFEGNYPVPPSVVHIGGIHQGPEKELPKDLQNYLDSSKNGVIYVSFGTNVEPSTLPAQKLKVLVDVLSRVPYDVLIKWNKDVLPGIGSNIKLSKWLPQTDLLRHPKVKLFITQGGLQSTDEAILAGVPLIGLPMWGDQWYNVERYERLRIGLNLDIKTLTEEVFENAINDVIQNESYRRNIQRLNTLIRDQPQPPLERAIWWTEHVLRHGGASHLRGPAANMSWAEYLELELVLVIALVLLLALALSILAFYYFYNNVLRQYLIAGKVKRS

SEQ ID NO: 7283 - protein, 416 aa, Spodoptera litura
MTCDPCFDCIHNHRNEYQVVSSVCLRTNHWHAQNNNARVKIALVLSQVVDAPVIQVSSFGPMNFNVETMGSAMHLFLYPNHMRQRLYNMTTWEKLLELYNIFRIEKAIEEVEEAENVMGKRLFGPNTKTISELKDNVQMLFLNIHPLWEGNRPVPPSVIYMGGLHQKPVKELPTDLKTYLDSSKNGVIYISFGTNVQPSLLPQDKIKIIAKVFSQLPYDVLWKWDKDELPGRSKNIRISKWLPQSDLLRHPKIKLFVTQGGLQSTDEAITAGVPLLGVPFIGDQWYNTEKYEHHGIGIKVDFSTLTEDIFKKAINTVLSNKSYRQNMERLRSVMYDQPQSPLERAVWWTEHVLRHGGARHLRGPAANMSWADYLERELVFTLLGIVISIVLALSFLLYKLWRCMNPSERQNKVKKN

SEQ ID NO: 7284 - protein, 558 aa, Neolamprologus brichardi
MQFQSDWICSQTQDLFVVSHMMQVSTSLPLLLLSLTLLLLHPVSPVHGGHVLAFPGEFSHWLNMRTIIEELVKRNHSVTILVPDASPSVNYNNSRDAAKFNFLVFKVSYSREEYVGTLHKFIQFSMYESHTSSPLQKIMKMNHFMGRTLDFGRQQCDGVLKNQQLMATLQDSAFDVILQDPFAMCGDLLADMLGVPLVLSLRFSFGSVMERHCGHAPLPPSYVPLAPLPYNDHMTFTERLINMVTYVASSMLTELAWKLSVNKYYSEIKGTPSSVCETMGKADVWLIRTFWDIETPRPTPPNFKYVGGLHCKPANQLPEDLEAFVQSSGDAGIIVASFGSMVTNLTMQHANIIATAFGQIPQKVIWRYRGEPPTALVPNTKISDWIPQNDLLGHPKTKAFVTHGGTNSLYEAVFHGVPLVGVPLFGDQPDNLARMSRRGTAIVLDFNHLTAEELAEALHVVTNQPSYRTNMKRLSAVHRDQPVTPLSTAVFWVEFVMRHGGARHLRLASYDLNWFQYHSLDTGAALLVALMTVAALWWVGIRCILRQCRRRAGREKKD

SEQ ID NO: 7285 - protein, 734 aa, Papilio xuthus
MRCGIIVIIFAVLASRSTECARILGLFPHIGKSHYIVFQSLLQALADRGHDVTTVSFFPIKNPPPNYKDVSLEGISDLGLEVLDLSLFEFPPVFMKIPVISVLLKAKVEINMLGDIGLGVCEQLVQLPSLAEVMKKEYDVILTENFVSDCMMGLLHVYGNKAPVIGLSSSTFMAWVPDRYGVNDNPAYVPVITCPYSTTMNFIQRLGNFIVNVYSKYWFYEYFQKEERSIIEKHFNTKIPDLEEISRNQSVLMLVNSVPILNGAKPTVPSVIEVGGMHLDHTRKELPSMVFEPLLRTLAERGHHVTTVSFFPLNNPPENYTDISLENISEVLLESLDLSLFESNGVISKIPVARRVLGLMFEFQPLAHFALHVCENMIQWEPLANVLKMEYDVILMENFNSDCMLGLLHIYGNTAPKVALSSSNLMPWSVQVKEQSLIEKRFRKVIPDLRDLSRNYSLTLVNTFHALNGVRPLLPALVEVGGMHLDHTHKPLPSYIEKFLNESEHGVILLSFGSLIKTSTIPKYKEDMIVNALGKLKQRIIWKFEGSGEEGTLTGNILRVKWLPQYELLQHKKVVAFIAHGGLLGMTEAVSAGKPMVVVPFFGDQPANAAAAAEAGFATVVPYIELTEEKLIKALEFVLSAETRLNARRVSSIWRDRQADPLETAVYWTERVIRWGHHAQLHSPARDMPLYQIALLDVIATLAVAILILLAISWYILSKVFRLLFGRESKLKMQ

SEQ ID NO: 7286 - protein, 524 aa, Drosophila virilis
MFSLRLCCLLPLVLLLPSLLDGARILAIFPFPGPSQYINVLPYLKGLASRGHEVTSVNAFPQKKPVKNFRDIVVPEVFQSYDDIISNIEAYRNVWQENTFINDFFISITKKVFENAEVQRELLKPGKAQYDLIIVEALRTDALYGFSAHFNAPIIGLSTFGTDWNVDELVGNTSPISYTPLVTAGLSDHMTYWQRVRNFFETAIAWLNWKLMYIPVQNQLYEQYFPHVAQKKPLAELSKNFSLILLNQHFSLSFPRPYVPNMIEVGGLHISHTPAPLPKEIEEFIQGAGSAGVIYFSLGSNIRSKDLPQERKQMLLKAFASIPQRVLWKFEDDQLPDKPANVFLSKWFPQPDILAHPNVKLFITHGGLLSTIESIHHGKPVLGLPFFYDQFLNVERAKRAGFGLGLDHKEMTTSEFKQTIERLINDPKFSTTAQLMSARYRDQPMSPQETAIWWTEYVLRHKGASHMRVAAQDLSFVAYHSLDVFGMFLVVGILILVTIYVVLKKLLCSLQGQQVSGKDKLKHH

SEQ ID NO: 7287 - protein, 526 aa, Microplitis demolitor
MYSLKIIFIATVAMVFYAQPTEALRILGIFPLPGRSHFIPAAQLLKGLAAKGHKVDVVSHFPLSKPVPNYTDISLKGMLRIATNNLTYNDTRQFNSFSMYQFTYMTGIEVCGLLNQPVFEKLLKTPKGTYDLIILELFGANCYLPFGQHLGAPVVAMVVSKMHDWLYGPFGVPFNTAYTPSLFSSFDQSMTFLQRLQNTLVSSIIVAQINYYMEIQKTYVEKYFGRKVASITDLYDEVSIVLLNSHHSLYDIIPTPPAIIEVGGLHVHDDQQELSPEIKKWLDESKDGCVYFTFGSMVRIETYPAATLEIFYETFKKIAPVRVLLKITDPKLLPPGLPKNVMTSPWLPQVAILKHKNTKAFITHGGLMGTQESLAYGVPMVGLPIFGDQYTNLQVYEKRKIAVVLKHEDITVESLTKAVTTVLNDPTYRDNIKRLSKLFLDRPMSALDTAIFWVEYTARHGNILKSPATKLSWWQYYLIDVYGFILLCIAVVLYITKHLIKLLYRLICSRKSSQNKTPVAKSKKNK

SEQ ID NO: 7288 - protein, 513 aa, Helicoverpa armigera
MMSLALCILVISITYNDAARILAVFPVPSISHQVVFRPLTQELARRGHEVTVITPDPVFTNEEAPANLTEIDVHFTYDVWKKFYETTSGVNNDLIEQTHTAFDLMNRIFEVQMKVDKVQKILKEQKFDLLLLEACVKPALVLSHILKVPVIQVSSFGPIFFNSATVGSAWHPLLYPINYVLKLNNLTKWDKLKELWSLYKIINVMQQVEQEENKTVKKLFGPDVPPMSELKNNVDMLFVNIHPLWDSNRPVPPSVIHMGGLHQKPQKELPQDLKSYLDSSKNGVVYISFGTNVKPSRLPREKIQILIKVFSELPYDVLWKWDEDELPGRSSNVRIEKWLPQSDLLRHPKIKVFITQGGQQSTDEAITAGVPLIGVPMLGDQWFNVEKYITHEIGVRLDIETLTEEQFKNAITEVIGDKKYRQNIKKFGEIIRDEPMTPLERAVWWTEHVLRHGGARHLRSPAANMSWTQFLELELVFTVLSVAIGFVLLLSFLLYYSYKHFVLIPKHKKIKGN

SEQ ID NO: 7289 - protein, 466 aa, Heliothis virescens
MSVLIVTFVFCSLFINLTEPARILAVFPVPSISHQVVFRPLTQELVRRGHEVTVVTPDPAFPKGQRPANLREIDVHELYGVWKKKIMTFPEQNKDNLLGQVKMFLDIGYSAIDAMLYNEEVRDLIENKSDQFDLLMLEACLRILLGLTSVFKVPVIQVSSFSASYSNFEMIGAPINPILYPSINRKKNHNLTMWDKIIETYNHYQVARINEEYEKLEDILLKKHLGSKTPPLAELANNVDMLFLNVHPVFEGIRPVPPSVVYMGGLHQKPDKGLPKDLKTLLDSSTNGVIYLSFGTNVDTTFVTEEKLRIFVNVLSQSPYLVLWKWDAETIPGQSENIKLSKWWPQSDLLKHPNVKLFITQGGLQSTDEAITAGVPLIGVPMMGDQWLNVEKYVHHKIGVKVDMETLTEEHLKNAIETVIGDGSYRHNVVSLRNKMYDQPMTPLERAVWWTEHVLRHGGARHLRSP

SEQ ID NO: 7290 - protein, 345 aa, Trichoplax adhaerens
PNPLAYIPQLGFAASNKMTLYQRTINVIIYYVANAVAHLVILPQMYNAMNTSNLGINSTPLFTERRSSFLIVNTDFAIDYSRPITPTSKVVGPILPKPAKPLPDDLQQFMASNPKGTVLVSFGSVVTALKYVTNITMLFDTFGQLPYNFIWKNTEELPDNIAPNIKIVKWVPQNDILGHPNTKAFITHCGMNSLLEGAYHGVPMVGIPVAGDQVIHATKISSKHVGVTLNVKEMTQSDLYYAIMNVTTRQDIINSSMQVSKLIQNRPNGRTPVEEAADWMEYALNCDGGEYLRTEEYNLRWYELHLIDVYAVLLVLLAIMVKILQLIWRGVKALCCAKAPKEKIS

SEQ ID NO: 7291 - protein, 401 aa, Lingula anatina
MFVDKELDRKVRELKFDLMIVCGYWFFAKAYLFPHRYAVPYVSIVLDMQQLAGVPMLPSFVPSLAITAKYSDKMSLPQRMLNIVPYVLLKHSIQPITPELSQKHAPGRPYMSTPELMAESELWIVDGGQPAIDHVKPSLPNVKYLGGLVTRPAKPLPKDLETFLKKHDHGVVLVSFGSLVKYMPDRVVQELFEAFKNVPYGVIWKYNGQPLKNVPDHVKIVSWMPQNDILGHPNTKLFITHAGNNGQMEALYHGVPMISIPLFGDQDYNAARAEQKGIAITMDAAFLKSEDLISAINMMMENETYAKNMRRASAIFRDQPGTPVELAGFWIDHVIKYGGSYMKSHARLLPWYQFYMLDVMLVFLAMILLICLFCGVCCSFVCKKLRGQSTSAGKQKTQKTE

SEQ ID NO: 7292 - protein, 516 aa, Heliothis virescens
MHLYKLIIYLLYLVVYSNGYEILAVFPHSARSHHIYFSALVEELALRQHNVTVINYHPVQKIPTLRQISLQNKENASACVDIEKRMEVLSVSDFALAYATAKVFKNIANTNCKKLMNHREVQELIESSSHFDLVIVEQFVTDCGLAVAYKLNAPAIGIAAHILSPWTYPRLGAPNNPAYVPNHFFGSGSKPTLWNKIKSLVINLGMNMYYTHVIQRSDQEIVNEVYPDTPLLEELGKNMSLILINQYFPLTGPRLYSSNVVEVGGLHINLNDHVAEDEGLLNFLDSASNGVVYISFGSVASNFPRKISNEIMKLVEKSNMRFVWKTDISDWVPPSNVLIGKWMPQTAVLCHPNVVGFISHSGMLSTSEAMHCGVPLVSVPLFGEQFANGRSAVESGLGVLLDVLTLNVHVLEDALKTILQEQYQKKAKTLSKLWKDRPLSPMETAIFWIEYVARNKEAVNLKPPTLDMPLYQYLMIDVLLVMALATLVIGYIIVKLISLVFIIVFEDHKLKGKKVE

SEQ ID NO: 7293 - protein, 545 aa, Diuraphis noxia
  MOD_RES (147)..(147): Any amino acid
MLSEHNHAACAGVHNNNKIYKMKHLFFVVLILFYVHHCLSANILAFLPTFARSHYGGFQPLLKELAVRGHNVTVLSHFALKNPPPNYHHIDVSKERQNDNNFSMLSIAPYLKPLIIPIGTLFFGSQITLETLNNTKVQEFIHSDGYXFDAVIFENFQHECFVSMSHKFNAHAIQLFPATPTAFTSQWYSQPFNPSYIPDPNSGYKDHMSLFERTINFLVTCLQFILFPIFYMPKQNEIMLNHFNYTGSEFRPSLEEMMKNISLTLINTHFTLGTARPLVPSFIEVAGMHLKPASKLPKDLQELMDNSPDGVVYFSFGSVVKGSHLPTHQVEMFLRQLGQIKQKVLWKWESDNLPELPPNVVVKKWFPQVDILGHPNCVLFITHGGIHSVEEAVYYGVPMLAISIFGDQLYNSIMMESRGAAIRLKYSELTENRFGDNLHNMLSNASYKQNAIKLSKIFHDQPMKPLDKAVYWIEYVIRHNGAHHLKTAANQLNWIQFLSIDVMLVILTTIFLFLIITFYIMKKMCKWFMSYRQRHTETNDDKKKK

SEQ ID NO: 7294 - protein, 520 aa, Ceratitis capitata
MHLLTTILMASAILLGSQVQSYRILGILHTGARSHHIVGSALMKGLARRGHDVTVISPFPLKEPLKNYHDIETPIIKGIMESTAQHLLETIKKNVFVNVKGFHEMGLNMTRTFLQEPNVRKLLASNQTFDVVICEVFLSEALFGLSEHYNVPLIGLGTFGAHPWNTDLVGSPSPPSYVASAMLPFRDHMTLWQRVGNLAYNTFERLLLDLYYLPKQEAIYKEFFPNNKRDMYEVRRNTALVLLNQHVSLSFSRPYVHNQIEVGGMHINRKRSPLPADLEKFINESKHGVIYFSMGSNLRSKFLPLEKRQIILDTFRGLKQRVLWKFEDPQLEGKPDNVYISSWFPQDDILAHPKVKFFITHGGLLSTTESIYHGKPFVGIPIFGDQFLNMNRAEASGYGIRVDYTNLTRESFKSAIERMLSNDSYAKRVAEVSAIYRDQLMDPLDLAVHWVEYVVRHKGAKHLHCAGQDLSFIEYHSIDTMLILFGGVSTVILLLMLLIRAAWRWLQFALARKDIKQKKH

SEQ ID NO: 7295 - protein, 522 aa, Spodoptera exigua
MSSLLFITTCFTLVLAPCEAARILGVFPVPSISHQVVFRAITQELAQRGHELIIITPDPAFPKGKTPANLTEIDVHDVAYKMWRDDIQDIVIGEIHGILPEYAIIMKLMAKVLDVELKDRQVQKLLNDKSQKFDLILAEACVRSAVVFSHIYKAPVILISSFGPFLDNYNVMGAPTHPLLYANNISRRFNNLTMWDKIVKLYYRYNIEVMLNKNYAYENQMLRSHFGPDLPPIEEIYNNVAMFFLNLHPIFEGNYPVPPSVVHIGGIHQVPEKDLPKDLQNYLDSSKNGVIYVSFGTNVEPSTLPAKKLKVLVDVLSRVPYDVLIKWNKDVLPGIGANIKLSKWLPQTDLLRHPKVKVFITQGGLQSTDEAIAAGVPLIGLPMWGDQWYNTERYERLKIGLILDIKTLTEEIFENAINNVIEDESYRQNIRKLNTLIRDQPQPPLERAIWWTEHVLRHGGGSHLQGPAANMSWAEYLELELILVIVSILLLAITIFMIASYYIFLCAKNKFYSNQSFSIIRY

SEQ ID NO: 7296 - protein, 512 aa, Papilio xuthus
MILRLILLYLLCLQFIESARILGVFPTPSISHQVVFRVLTHELARRGHELTVITTDPVHPNEVPENLTQIDVHDLSYSRWNKVISEMEDGSRDVTKQVEAMMNLNFEIFEEQVKCKSVQKLLSYKHDHFDLIIVEAFLLFTLGFSHVFKAPVIWVSSFAGVWDNYEAIGAPSHPFLYPVSVRDKLNNITMWEKINQLRKEYKMRNLNRNNVAVNKLLKKLFGEDTPPIQKLFDNVAMLFLNVHPIWDSNRPVPPGVIYMGGLHQNPIRELPKDLKLYLDSSKNGVIYFSLGTNVKPSYVPPEKLQAIINVFSRLPYEVLWKWDNELLVRSNNIKISKWLPQSDILRHPKVKLFITQGGLQSTDEAITAGVPLVGIPLLADQWFNVDKYVQHKIGVRIDIDTLTEEMFENAIRTVINDTSYRENILRLRSIMQDQPQSPLERAVWWTEHVLRHRDARHLRSPAANISWTQYLELELVFTLASVLILSLVILFVVLKIIWNYITSVVTTKIKKS

SEQ ID NO: 7297 - protein, 437 aa, Pieris rapae
MKEKRLKFGDKAGMYKVTEDLATLLGMLIEEQLKTDGVQKLINDKSKKYDLIIIEACTRPAIMFSHLYKTPVIAISSFGMAFGGEDLVGAPSHPILYPNMLHQRLHNLTFWEKFNEFYKHYWIVNMWKSTENKEFRLIKKYFGGNDVPSYEELYKNVDMMFLNIHPMWSHNQPLPPNVISIWGIHKSPPKSLPQDLQAYLDSSKNGVIYISFGSNAPSSLLPPEKIKILINVFSKLPYNVLWKWETDVLPGKSKNIKIAKWLPQSDLLRHPNIKLFITQGGLQSTDEAMNAGVPLIGIPMLGDQWYNVELYEYHKIGVRIELETITEEQLTKAIKTVTNDKSYKENIIRLNRLMNDQSQSALDRAVWWTEYVLRHGGAKHLRAAGANISSFEYYEIEFLLKLVSLVFSIAAIILYLMYRVLRIIVPSNSPSSKSKTS

SEQ ID NO: 7298 - protein, 1066 aa, Trichoplusia ni
MGVLLHITSFYILFVYTIQAARILVVVPTPTISHQSVFRPLTQELAKRGHDVTVITTDPAFPKGGAPANLTEIDVHDTSHDASIKTSFAKSSLDLIQQFKLIPEMVLSIIEVQLKDENVANLIRDKNRQFDLLILEAYCRPLLLYSHIYKVPVIQMSSAGAFRNSLKQFGVPTHPLLYTHVPSQRLNNLTMWEKVKSLYFTYTLDKIMDDMVVKEDAFLRKHFGSDFPSVTELSNNVDMLFLNVFPIFEGIRPVPPNVVFTGGLHQNPVKELPEDLKSYLDSSKNGVVYLSFGSTMDPTLLPPERIQVLVKAASQLPYDVLWKWNGDELPGRTENIKISKWLPQSDLLRHPKIKLFITQGGLQSTDEAITAGVPMIGVPLLGDQWFNVERYEYFKIGVRLDLDIITEDNFKATVHKVIGDDSYRQNIVRLRGLLHDEMQTPLERAVWWTEYVLRHGGAKHLRSPAANISWWEYLELELVLTVLGGVLAISSVFILIAFKAYMYLFATYPGKKTSPGKKKRNPLTPLRLKTMSTEQFMTKLKKQFRVGIDMGILFYSLTLYILFVNTNEAARILVVVPTPAISHQSVFRPLTQELAKRGHDVTVITTHPAFPKGGAPANLTEIDVQDVSHDTWTKPFLEKPPTNMVDQMNLLSDMMVDTVEAQLKDEKVATLLNDKSRQFDLLILEAFCRPLLLYSHIYKVPVIQMSSAGAFHDSYVQFGAPTHPFLYPIVPSERTNNLTLWEKLKELYIIHIMNNFADDITVKGEKLLKRLFGEDSPTMKELSNNVDMLFLNVFSIFYGIRPVPPNFVYIGGLHQNPDKELPAELKSYLDSSKKGVVYLSFGSSVDPTLLPPERIQVLVKAASKLPYDVLWKWNGDELPGRTENIRISKWLPQSDLLKHPKIKLFITQGGLQSTDEAITAGVPMIGVPLMADQFFNVERYEYFKIGLRLDLNVITEENFISTVNKIIGDDSYRQNIVKLRGLLRDEVQTPLERAVWWTEYVLRHGGAKHLRSPAANISWAEYLELELVLTLLGGVLVILGALLLIVVKLYKCLFSRKVAPVKSKRN

SEQ ID NO: 7299 - protein, 535 aa, Sturnus vulgaris
MRVPLCTTYTMLLALLLPFLCLLSPAAAGKLLVIPMEGSHWLSMKKVLLELSKRGHEIVVVAPDNKILIDSADVYELKTYPVPFTKEDMEEHIRSVSARTFSQDPFLVRFSKLLEDYRKSGTMFHASCKSLLYNQELMKYIGDSHFDALLTDPVSPCGQIIALHFSIPSVFFLRMVPCALDVRAAQGPDPPSYVPRMFSENSDHMTFSERVRNFLIALSESFICNIAYSPFEELASEFLQKPMTMTELLSHGSVWLRRIDFVFEYPMPVMPNMVFIGGIHCGEKKKPLSQEFEAIVNASGEHGIVVFSLGSMVSEIPEKKAMEIAEALGTVPQTVLWRYTGKTPSNLPKNVKLVKWLPQNDLLAHPKTRAFITHGGSHGVYEGICNAVPMVLMPLFGDQMDNAKRVESRGAGLTLNILEMTSNDISNALKAVINDKKYKENIQRLSELHLDRPIHPLDLAVHWVEFVMRHKGAPHLRPAAHDLNWVQYHSLDVIAFLAAVTLLSLFISFKCCLCLCRRCFCKKGRTGKPAKAKSH

SEQ ID NO: 7300 - protein, 533 aa, Canis lupus familiaris
MAAGFLAPLPVLTGLLLILCDGRWVEGGRVLVVPMDGSHWLSMKKAVQKLHARGHQMVVVSPESNMHIKEEDFFTLTTYATPYTQEEFDNFMLGQSYLVFQRMSFLKTFLKTMEGLKTATLIFQRSCESLMHNKNLIRHLNASSFDVLLTDPVYPCGAILARYLSLPSVFFLRNIPCDLESESTQCPNPSSYIPRLLTRNSDHMTFLQRVKNMLYPLALKYFCHFSFTPYASLASELLQREVSLEDILSSGSVWLFRGDFVLDYPRPIMPNMFFIGGINCANRKPLSQEFEAYVNASGEHGIVVFSLGSMVSDIPEKKAMEIADALGKIPQTVLWRYTGTPPPNLSKNTILVKWLPQNDLLGHPKARAFITHSGSHGIYEGICNGVPMVMLPLFGDQMDNAKRMETRGAGVTLNVLEMTSADLANALKAVINDKSYKENIMHLSRLHKDRPIEPLDLAVFWVEFVMRHKGAPHLRPAAHDLTWYQYHSLDVIGFLLAVVLGVVFITYKCCAFGCRKCFGKKGRVKKPHKSKAH

SEQ ID NO: 7301 - protein, 289 aa, Danaus plexippus
MEREAKENILLEKLFGSDIPPLHELANNVNLLFLNVHPIWIDNQPVPPNVVFIGGIHKQPPEEIPTDLLYFLNASTNGFVYISFGTNVKPSLLPPEKIDIMIKVLSKLPYSVLWKWDKEGMPRQTNNIKYVPWVPQKDILMHPNIKLFVTQCGLQSTEEAINALVPLIGIPVLGDQFYNAEKYVYHGIGIKLDLDYLSEEVFSGALETILNSKSYRENLIRLRKIMNDQPESALQRAIWWIDYTLRHGGAKHLRARGANITWAQYLELELVFTVLSAVLITYLILGGFA

SEQ ID NO: 7302 - protein, 546 aa, Caenorhabditis brenneri
MNIKLLILTFCFLVFSNASKILIFNPIFGFSHVKFISKMADIIADHGHNVTLFQPYHNALKNLDGLVKNKNIEVKKFPCNIQIKNFFQILNYYPSHYSELLKAETQTFPIFWDSKLIGNPILGAFMLASVLGGEFKKTSMGRYIYITSIRKVLFAEVVSDQNLINDLKSRKFDVVMAETFELTGIYIQFSNGLFGQPSFLGHVPQPGSKGAPEAGFLDRLNDMYRFVFVHIGQERLNLYQNKFIEEAIGRPVPFWKDLVKQSPVYITNSNPYLDFAVPTTASIVHVGGITMDLEKMKNVGKLPEEYEKIVSERESTVLISFGSVIRSHEMPENFKAGIIKMFELLPDITFIWKYEKEDVEFQKRLPKNVHLKKWVPQPALLADERVKVFITHGGLGSTMEVAYTGKPAIMVPIFGDQNHNAMMLARHGGAVAYDKFDLKHGDQLANVITTMVSDPKYKNNAKMLLEVLRNQPIDPKMNFLNHLDFAIKFPNHRSQVPEINEVGWIAHYYLDVLVFLSISAVVFTYLLVKMLKRVFRRFLEKKTKTE

SEQ ID NO: 7303 - protein, 517 aa, Neodiprion lecontei
MKLGITFLFLVVACVADCSRILAIFSYPVQSHNMMFEPLMIGLARAGHSVDVISHFPPKKSVQGYNHISLKGTLHNLVNNITADYASIHGGVYQMMNFLCNREVKDLCGLLPLPQLQRVTNADTKYDVMITEILGSNCYLSVAHIMKIPFIGIVTNVVYPWVIDPVFGDANPSFIPSQLSTFTNEMSFFERVENMMIHVYSKFLFYYWDVTVSNPLARKYFHDLPPLNDIYNNISLVLANSHFSIHGVRPGTQAIVEVAGLHIDETQVLSEELERFLNSSKDGVVYFSMGTLVRSDTFQVEKILAIYESFSELTNYKVLWKGNLKDMPKPLPSNVKIVSWVPQYAILRHPKVKAFVTHGGAMGTQEAIHAGVPIIGIPFFFDQSSNVMGYVQRGFGVYLSYKDISKVSFSKALREVLSNPKYQSNAARYSRLFRDRPLSPMDEAIFWIEYVIRNGGEPLRSSGQHLNWFQYYLIDVGLFLLAITMLVIAVVFTFVKTVLHIIACKQSCELPVKDKFS

SEQ ID NO: 7304 - protein, 531 aa, Chinchilla lanigera
MATALQVPLRGLLGLLLMACVTPWAEGGKVLVVPMEGSHWLSMKDVVRQLHARGHQAVVLAPEVSWHIKEEDFFTVNFYAFPYTQEEYNHLFLDYTKMVFETQNYVESFLKTKVKKDSALLLSGCSHLVHNKELMASLAESSFDVVLTDPFLPCGAIVAQYLALPAVFFLNALPCGLHYEGTQCPNPVSYVPRSMSSNPDHMTFLQRVKNMLFVLTEKVTCNVVYSPYAQLASEVLQRDVTVQDLLTSASIWLLRTDFVNDFPKPVMPNMVFIGGVNCLHKNLLSKEFEAYVNASGEHGIVVFSLGSMVSEIPEKKAMAIAEGLGKIPQTVLWRYTGTPPSNLAKNTILVKWLPQNDLLGHPKTRAFITHAGSHGIYEGICNGVPMVMMPLFGDQMDNAKRMETRGAGVNLNVLEMTADDLEDALKKVIYDKSYKENIMRLSSLHKDRPIEPLDLAVFWVEFVMRHKGAPHLRPAAHDLTWYQYHSLDVIGFLLAIVLFVAFVAFKCCAYGFRKCFGKKGRGKKAHKSKTH

SEQ ID NO: 7305 - protein, 522 aa, Trichoplusia ni
MEALKCVLFFLTVANWCESANILYVVPFTSKSHYIMLKPIGLELARRGHNVTVITGHRDPNPPPNYRQVMVDEKEIWDVIGGRPNVFDMAQTSTEEFHYNILWKGGLAFMEVVLDSKEVKAFLAEDNKFDLVINEQFYQESLNVLAHKYNAPLALVTTFGNCMRHNILVRNPLQLSTVISEFLPLEDPTSFYGRLRNLYFTVYEYIYWRYWYMNEQERFVKKYIKGLPEPVPSLYDLQRNASLMLMNSHFSFDTPAAYLPNVVEIGGSHLIRSNTTLPADLQKVLDNAKNGAVYLNFGSNVRSAEMPEDKKNAIINVFRKLKHTVLWKWEDDHFKNKPDNLIIRKWMPQKEILAHPNVKVFISHGGLIGTQEATYNGVPLIGIPIYGDQFNNLLQAQSFGYAKILQYNDINEENLYKLLHEVLTNDSYAKNAKEMSRRFQDRPMSPLDTAMYWIEYVIRNNGAHYWKNPALELSWIAAYMIDVYLFIFGVTLLFLYVVAKVVSIVLSAFSGKKTKKQKTKRS

SEQ ID NO: 7306 - protein, 533 aa, Cavia porcellus
MATASRIPHLLILGLLLCALRPLVTHAGKLLVVPVEGSHWLSMVGALQQLQQNGHEIVVLAPDALLYIKEDSPFTLKRYPVPFSKEDLETNFALLGHFVFENDPFLIRVIKMYKKIKKDSAMLFSGCSHLLHNKELMASLVESSFDVVLTDPFLPCGAIVAQYLVVPAVFFLYALPCGMHFEATLCPNPMSYVPRSMSLNPDHMTFLQRVKNALITLTEKVACNFVYSAYAPLASEVLQRDVTVHDLISSASFWLFRNDFVFDYPKPVMPNTAFIGGINCLHKNLLSQEFEAYVNASGEHGVVVFSLGSMVSEIPEKKAMAIAEGLGKIPQTVLWRYTGTPPSNLAKNTILVKWLPQNDLLGHPKTRAFITHAGSHGVYEGICNGVPMVMMPLFGDQMDNAKRMETRGAGVTLNVLEMTSDDIADALKKVIYDKSYKDNIMRLSSLHKDRPIEPLDLAVFWVEFVMRHKGAPHLRPAAHDLTWYQYHSLDVIGFLLGIVLLVAFISFKCCAYGFRKCFGKKEQRKKTQKSKTH

SEQ ID NO: 7307 - protein, 507 aa, Drosophila busckii
KMQPQRLLFSCLTLWSLWSAAWTARILLVFPYDFPSQCMLLTPYIRALVERGHELTLIHAFNNCDVVHEVHAIYAKDRQFKINDWFEHEVTPSISKFGQLASLLKYLVKMHLNVLEDPQVQQLMRSGVSYDLFIIEPSYTDALFGLAAHFNATAMGLATCGADWNMDGLVGYKSSSALETISSSISFKPDAGLLDQLYNWMQISEEWLLQQLIFLPQLRSVHTHFFGHLAQSFEQNRQSFSLILLNQHFSLFESRANVPGMVEVGGMHVPKQLPALAPQLARFIAEAEHGVVYISLGNELQSKDLSAKTLQVLLHTFESLPQRVIWRFETEATPNASSNIYFGQWLPQQAILAHPNLRLFINHGGMLSIIEAAHYGKPMLGLPLFFDQARNVERLVLEGTALSLDINALTKHSFDHALRQLLCQPQYRLRAQALSQRVRDVPLHPLDSAIYWTEYVLRYKGAAHMRVSSANIKLTDYYCLDHLLIIFVRFGLIFLLVVYILFKLKSY

SEQ ID NO: 7308 - protein, 518 aa, Trichoplusia ni
MGLLCLLTSLILIVNTNEAARILGVFPTPSISHQVVFRPLIQELAKRGHDVTVITTDPAFPKGGAPANLTEIDVHDISYNIYQEIINDIPRGNKNDVIHQMEESLPFLTKIVDKQLNDEAVRRLIEDKNKKFDLLILEAWVRPALGFSYLYDAPVILMSSLGAMFDNSATVGAPTHPILYPSIFRQKLKNLSMWEKIWELYTHYKILDIHYQNRHFEDQILKKNFGPDIPSVLELNNKVDMLFLNVYPVFEGIRPVPPNVIYTGGLHQNQEKELPKDLKSYLDSSKNGVIYISFGTNVDPTQLPPERIQVLVKAFSQLPYDVLWKWNGDELPGRTENIRISKWLPQSDLLKHPKIKVFVTQGGLQSTDEAITAGVPLIGVPMLGDQWYNVEKYEYHKIGVRLDLDDITVENFKNTLLKVMGDESYRQNIIKLRGLMRDEVQTPLERAVWWTEYVLRHGGAKHLRSPAANISWWEYLELELVLTLLAGLVIIVTALVLILFALYKHFLKYAASIKVKRA

SEQ ID NO: 7309 - protein, 530 aa, Myotis davidii
MAPAVLTGLLPLCVCLLLAPGFAQAGKLLVIPMDGSHWFTMRSVVEKLSHRGHEVVVVRPEVSWHLGQSSNYTVKTYSTSYTLEDLNDQFRTFADSQWKTRPQYLHSMLMSSSNSVFEYFFSNCRSLFNDKKLVKYIEDSSFDAVFLDPFDMCGFIVAKYFSLPSVVFTRGLFCHYLEEGAQVPNPLSYVPRGLFSLSDTMTFRQRVWNHIIHLEEHLFCDYFLKTALEVASEILQTTVTAYDLVSQPSIWLLRNDFVLDYPRPVMPNMIFIGGINCHPGKPLSQEFEAYVNASGEHGIVVFSLGSMVSDIPEKKAMEIADALGKIPQTVLWRYTGARPSNLAKNTILVNWLPQNDLLGHPKTRAFITHSGSHGIYEGICNGVPMVMMPLFGDQMDNAKRMETRGAGVSLNVLEMTSEDLENALKTVINDKSYKENIMRLSSLHKDRPIEPLDLAVFWVEFVMRHKGAPHLRPAAHLLTWYQYHSLDVIGFLLAIVLGVAFVVYKCCAFGYRKCFGKKRRVKKSNKSKAH

SEQ ID NO: 7310 - protein, 523 aa, Linepithema humile
MRILLLIFPLLLYSSICHGYRFLALFPYNGHSHFVMFEQLLKGLARKGHQIDVVSHFPLKKPYSNYTDIVTLTATVTVKDSLTYEFLKNTLVGINPVSIIAETFGNDLCEFLAHPKIQELVRNPPKDPPYDAVIMEIFGAQCFAVIPHLLNVPAIAVSTTVLYPWLHKIIAQPYNVAFVPNNCITGIPNSMNFWHRLYNSVNTLYSNLLFNYLTRKQDEILRQHFGPDIPSVRELEAKIALILINSHIAVNTIQPQTPAAVDVGGLHVIDDVTLTLSPTLEKWMNESKDGFIYFTFGSMAIIETFPPEFLNILYSSLSKIAPIRVLIKVSNPDKLPPGLPKNIYTSPWMPQIKVLKHPNIKGFITHGGLMSTQEAIILGVPMIGIPLFADQFLNIDIYVKKNIAVKLDLYTMTEKDVDEALNAILWNPIYSESVRNLSQRFLDRPLNALDTAIYWSEYVIKYGSDALRSPAMDLYWWQLYLLDVIVFLLLCAIIVVIVIRFFVRLLLQMINDKRKSLHTKKTN

SEQ ID NO: 7311 - protein, 832 aa, Papilio machaon
MFPTPSISHQVVFRPLTQELAKRGHEVIVITPDPAYPKGQAPKNLTEIDVHDISYSKWKIMMGRIKDVARDIIAQLEVIINSNNAVFEEQMQTESVQEILKYKDDYFDLILVEACVRPAIGLSYVFKAPIIQVSSFGAIMDNHYIMGTPTHPLLYPSMSRDRLYNLTMWEKFKQLRKEFITDMYTNNFEYDNDILKRVFGENVPRIYELYDNVAMLFLNFHRIWDSNRPVPPGVIYMGGLHQNPQKELPKRSRTATPAESEGSASPAPAPSSLLQDVVDIKTLLLQLKRVLQEGRNGLGNIYVWASGDGGEDDDCNCDGYAASMWTVSINSAINDGQNAHYDESCSSTLASTFSNGARDPSTGVATTDLYGKCTATHSGTSAAAPEAAGVFALALHANPSLTWRDIQHLTVLTSKRNSLYDAKSTDEAITAGVPLIGIPMLADQWYNVEKYVHHKIGLMVNIDTLNEEKFESAIKSILTDNSYRENILRLRSIMQDQPQRPLERAVWWTEHVLRHGGARHLRSPAANISWAQYLELELVFTLATILILFLFLNEIHENVVMKRLFGEETPMIHELFEKVEMLLLNVHEIWDNNRPVPPNVIYLGGLHQNVKKDLPKDLQTYLDTSANGVIYVSFGTNVRPSLLPMRKIKILTEVFSELPYEVIFKWDKDELPGQTSNIRIMKWLPQADLLRHPNIRLFITQGGLQSTDEAITAGVPLLGIPMLGDQFYNVEKYEKLKIGRGLNMDTLSKETLAAAINTVIEDESYRRNIQHLRTVMNDQPMKSLDRALWWIEHVLRHGGAGHLKSAGAHVSWSEFIELDVIIVLTLFLLFYN

SEQ ID NO: 7312 - protein, 426 aa, Vanessa tameamea
MILKTSIFILTYLFTVTQSAKILGIFPIPSISHQVVFRKLTQELVKRGHEVTVITTDPAYPKGKAPANLTEIDTHDISYTIWRQVLQDNFKFEQKSVPKFTEFRQANQFFSYIFLGQLNSPEVKELVSNKNNKFDVVLIEAVVRPALVYSHIFKAPTILVSSFGAIFNNHDVMGSPTHPILYPSTLQQKIYNLTFWEKLHNLYIHFTFEYANYLGEADEHAMFKKHFGPDVPPLSKLYENVHMLFLNIHPIWADNQPVPPGVVYMGGIHQSPEKELPKDIQSYLDSSEHGVIYVSFGTNVLSGMMPEEIVKIIANVLSKLPYNVLWKWDKDELPVKSKNIRISKWFPQSDLLRHPKIKLFVTQAGLQSTDEAITAGVPLVALPMLGDQWYNAEKYEKHGIGINLQTGTLTEDKLKNAIETVINDER

SEQ ID NO: 7313 - protein, 244 aa, Drosophila busckii
MQTFLDNAEHGVVYFSLGSYMKSTDMPPEKTAQLLQAFGKLKQQVLWKYENDSMQLPPNVMISKWMPQNDILAHPNVKVFMTHGGIFGTQEGIHWGVPMLCMPLYGDQHRNTIRSVRGGYARALVFSKLSVDSLVQNIEALIYEPQYKRNALEISQRFRDNAQHPLDEASFWIEYVIRNRGAPYLKSKGAFMPLYQYLLLDVLGCLLLGLFLGVWLPWRLLRRVHKWWAAGAAAAQAEKVKKRL

SEQ ID NO: 7314 - protein, 506 aa, Spodoptera litura
MKFNNIIILFCALFSQVLSLNILGVFPYQGKSHFFVFGPYLKELARRGHNITVISYFPLKEPIDNYHDIKLSGKVLEDVFPIYRSYWTIIETSLFLKNSGQENCITLLENENVQRLWKTEQKFDVMLMELFNNDCALGLAHKLGAPVVGLTSHVLMPWHYEDYGIQYNPSYVPVLFLEGGTKPTLYQRIERSIFHVYLVYLHKLTCRRNNQKTLAQYFDDVPPLGDLAKNVKMLLLYTNYVVSGSGLYPPNVREVGGYHVTKPKELPQDLKKFIEESEHGVVYISFGSMLRSTSTPKDKLDAIIAAVSEIPQRIIWKWEEKTLPGNPKNIFISNWLPQNDILAHPKVLAFYSHCGMLGTTEAIHYGVPMIGMPIFGDQPGNAAAIEESGLGVQIHIKDLTKELLLEKLRTVLNPEFRRKVKELSKIWHDRPQSAMDTAIYWTEYAARTANYTFRSPASSVPLYQYRIWDVTAVILAILIIFIYSIKTVISLVQKRREDRYYEFKTK

SEQ ID NO: 7315 - protein, 535 aa, Drosophila ananassae
MRISSSGAGIGLFFVVGLVLVLSSNADDKVKSSRILAVFPFPGRSQYIFAEQYLKELSRRSHNVTVINTFGSDKIEPNFRVIGAKKIHELMAAFNSIMYNAPASQWKMLTMTTEFINLLTTCILDDPAVKELLASDERFDMVVFETVQNEALFGLAQHFGALTMGISSYGTDRHIDELMGNISPLSYNPMLLSSRTERMNFEDRFWNLWDALLLWVHKRVVHLPTQRDLLKKYFPESKQSLEEIMDKFSLVLMGQHFSLSYPRPYLPNMIEVGGLHLQQQRKVQPLPQELSDFVGQATEGVIYFSMGSNIKSKDLPPSVRQALMETFASLPQSILWKFEDDQLEEKPANVFISKWFPQPDILAHPNVKLFITHGGLLSTIESIYFGKPVLGLPVFYDQHLNIQRAKQAGYGLSADLWSSNATVLIPLIQELLVNPSYAKAAETKSRLFRDQKETALERAIWWTEYVLRNDGAAHMRCASPDLSFVQFHGLDTWGLLLALALLVLLSFAIVLKLLFRGLCYVIVKRRHRTNKLKTH

SEQ ID NO: 7316 - protein, 516 aa, Galleria mellonella
MGYQANMKSMVCMLLLCMAAAKVSSYHILGGFAIPSRSHNHLGKGVVDSLLKAGHQVTWITPYPFENKNKNLKLIPVATQVIGESLNMMNPEVANRGISLIKECALNVTSVTINTPAVREAIVNTKFDAVVTEWFFTDTDVGYAAVQQVPWIVLVGTVYNSILEEMVDEVRSVPTVPIFLNNATIPMNFWQRLLNTGLHSLITLYNWWDRLSATERYNAYFSPLAAARGVPLRPFSEAANDLSILLVNGHPSFAPAQPVPPNVINVAGYHIPEDTPPLPKDLQDLLDSSKHGVVYFSMGSVLKSAALPEHIRRGLIQVLGELPYTVLWKFEEEISGLPKNVHVRPWMPQPSILAHPNVKLFITHGGLLSSLESLQYGVPLLAIPMFGDQRNNAQTAYQNGYARQVVFGDDVADQLRVELKEMLNNDKYYKRAKYLSRLFRNRPVPPSKLVSHYVELAIETKGAHHLRSPSRQYAWYARWMLDQAALLLVALYLVYRLARALLSLCCGKYKQKIKTH

SEQ ID NO: 7317 - protein, 523 aa, Orussus abietinus
MKSLLLLGVLFLAQSEGARFLGLFPLQGKSHFIMMEQLMKELARRGDQVDVVSHFPQKTPFPNYKDIDVSGTVPIVVNNMSISYVDTFNTLSVKKLVHMAGTQVCQLLGHPKLQEIIKNPPKDPPYDAVIVEVFASHCYFAFGRLLNVPVIGVTSSGLYDWMNEPMGNPSNPAYIPGGFTGFPAKMTFIQRLSNTLISLFINFDFQWWINEQSELIEKYFGPDMPKVEVLQKELTLLLVNSHFSLNGVRPLTSAIVEVGGLHVKSGGVLPQELQKWLDDSKHGVVYFSFGSMMKIESLPEKTLLAFYETFRKIAPVRVLMKIPKVDELPKGLPENVKTMQWIPQVEVLEHKNVKVFITHGGNMGTLEALRFGVPLIGFPLFGDQHANIQNFVNRNIAIALDYKKVDEKQLTEAITTILKDPSYKKNAENLSRKYLDRPLSAMDTAIFWIKFVLRNGNVLRSPSLDLTWWQVNLLDVYGVLLGGLLLTLYILQLVLRGLWRLLKGSSRGSSGKSATSSRSKKTN

SEQ ID NO: 7318 - protein, 530 aa, Rattus norvegicus
MAPSGCPSSLPLCVCLFLASGFAQAGRLLVVPMDGSHWFTRQMTVEKLLQRGHEVGVVIPEESWQLGKLVNCTVKTYSIPYTVEDMDREFKHFSYTQWKTPEQSMYSLITGSVKDFLEITFSHCRSLFKDKKLVEYLKQSSFDAVFLDPFHVCGLTVAKYLSLPSIIFAKDIFCDNLKEGAQCPSLPSYVPRLFSKSADTMSFKERLWNHLIYFEERAFCSYYLKTAIEIASEVLQTPVTLTDLYSPVSIWLLRTDFVFNFPRPVMPNMVFVGGINCFQRKPLSKEFEAYVNASGEHGIVVFSLGSMVSEIPEKKAMEIAEALGRIPQTVLWRYTGTRPSNLAKNTILVKWLPQNDLLGHPKARAFITHSGSHGIYEGICNGVPMVMMPLFGDQMDNAKRMETRGAGVTLNVLEMTADDLENALKTVINNKSYKENIMRLSSLHKDRPIEPLDLAVFWVEYVMRHKGAPHLRPAAHDLTWYQYHSLDVIGFLLAIVLTVVFIVYKSCAYGCRKCFGGKGRVKKSHKSKTH

SEQ ID NO: 7319 - protein, 520 aa, Atta cephalotes
MRILLVIFHLLFCLSICHGYRLLGIFPFHGKSHFVMIEQLMKGLARKGHQVDIISKFPLKKPYPNYTDIVILPTDVHLVNNVTYETMQQLITSNPINAVSTWAGNELCKFLGNPEIKELSKSKDPPYDAVFIEIFGAQCYSVIAYMLKVPLIGISTTSLYPWLYDMIAQPESLAFVPNNVINLAEPMNFWQRLYNVVHTFYDKWYFNYLTTQEQDRIIRKHFGPNIPSVRELEKKMSLVLINSHIALNGIQPRTAAAVDVGGIHVQDENETLQPELEKWMNDSKDGFIYFTFGSMVMIETFPYEFLRALYASLGKIAPMRVIMKIPKPEKLPAGLPENIYISPWMPQIKILKHPNIKAFITHGGLMGTLEAIICGVPMIGIPLFADQFSNIDRYVAKNIALRLDVNTITEKSFDAALNAILRDPLYRENARKLSQRFFDQPLNAVDTANYWVEYVIKYGENCLRSPALNLTWWQLSLLDVIGFLLFCITIIVTIVIFIVRFVKEMLNGNYNSLSYSKKIN

SEQ ID NO: 7320 - protein, 530 aa, Chinchilla lanigera
MAPARSPAPLPLCLCLLLASGFAQAGRLLVVPMDGSHWFTMQSVVEKLVQRGHEVVVVTPEVSWQLGQSLNLTVKTYSTSYTLEDLDRNFKDFAEAQWKNAEKSILFALRDLPVGFFDLLFSHCRSLFKDKKLVQYLQESSFDAVFLDPFDACGLIVAKYFSLPSIVFSRGIFCHYLEEGAQSPAPLSYVPRVLLGFSDAMSFRQRVWNHIFHFGEHLLCPYVYKKALEMASEILQTPVTAYDLFSHTSIWLLRGDFVLDYPKPVMPNMVFIGGINCHEGRPLPQEFEAYVNASGEHGIVVFSLGSMVSEIPEKKAMAIAEGLGKIPQTVLWRYTGTPPSNLAKNTILVKWLPQNDLLGHPKTRAFITHAGSHGIYEGICNGVPMVMMPLFGDQMDNAKRMETRGAGVNLNVLEMTADDLEDALKKVIYDKSYKENIMRLSSLHKDRPIEPLDLAVFWVEFVMRHKGAPHLRPAAHDLTWYQYHSLDVIGFLLAIVLFVAFVAFKCCAYGFRKCFGKKGRGKKAHKSKTH

SEQ ID NO: 7321 - protein, 539 aa, Culex quinquefasciatus
MQHFTSLLLTTLLLAFVPLATSSKILVLVPFPAPSHWLWLEHFVQELLERGHQVTAISNFAAKERHPNYTEILIDPPFDIPYYFPVSDIFEAKYTSDLSNLLLYWNVGLTTTKFALENPNVQQFIEQDDSVFDLVISEQFYQEAFLMFAHKYRAPIVTIGTLGYSDFMDRAMGLLTPWSFVPHPILLYMDDMTFSQRCYNFLVSAVDALIRKYYYMPRQDKLAQKYFSAIEGPESFPSVYELEKSISVMLINSHVSTSPPRPSISGLVNVAGAHIQPAKPLPADIQRFLDGATEGAIFFSLGSYVQSSDMPKDKLKAFFEVFRNLKQKVLWKFEDESMTNVPRNVMVRKWLPQSDILAHPKVVLFITHGGMFGSQEGIFRGVPMLFIPFYGDQHRNALRAERAGYALTLNFADVNAITLGSRINELLTNPAFNRLAKKASELFRDNLVPPMDEAMHWIEYVIRHKGAKHLKSISVDFNWVQYLMLDVLTFFVIAILLTSFLVYHIIGAFLEKPTKHKSKDHKRPTVPPKVRTVKKVKAN

SEQ ID NO: 7322 - protein, 523 aa, Microcebus murinus
MAGRWVLLLVGSLLPGILLSEAAEILTMSTLGGSHYLLMGRVAEILQDHGHHVTMLRQGGNSLISDFKEEEKSYQVISWFPPEDYQKEFEKVSSLFVEEGYNERKMFQNYLKLVEQLGFQCSHLLNRRDIMDSLKNKNFDLVIVESFDYCHFLIAEKLGKPFVSILPTTFGTVHFGLPNSLSYVPVFHSSLTDHMDFWGRVKNFLTFFTFSRRQWQVQSMYDNIIKEHFPEGSRPVLSQLLLKAELWFVNSDFAFDFARPLLPNTVYVGGLMAKPTKPVPQDLENFIARFGDSGFVLVAMGSVVNMNTLQEVLKEMNSAFAHLRQGVIWKCKHSHWPKDVNVSTNVKLMDWLPQSDLLAHPSIRLFVTHGGQNSIMEAIRHGVPMVGIPVFGDQLENMVRVEAKNLGVSINLKELKAETLTLKMEQVMEDKRYKSAAVAASVIRRSHPLTPAQRLVGWIDHILQTGGAAHLKPYAFQQPWHEQYLLDVLLFLLGLTLGAVWLCGKLLRVVSRWLCGARKLKET

SEQ ID NO: 7323 - protein, 519 aa, Merops nubicus
LVLSLSFWSLAEGGKLLVVPQDGSHWLSMRVVLERLWEKGHEIVAVVPEATLLMKSSESFTIKTYSVPYTQEFLDGFYHSIGQSTFQNPPFLEKITGLVKNVSEATEMFSSACRHLLYNEELMKYLQDSKFDAIMMDPVLPCGPIIAEYLSLPSVYFMRGLPCALDYEAARCPSPFSYVPRTFTSSSDHMAFMERVKNLLVGFSGHLICYLFYFRYENLASEFLHREVTMLELFSQASVWLMRYDFVFEYPRPVMPNMVYIGGINCEQKKPLSKEFEAMVNASGEHGIVVFSLGSMVSEIPMKKATEIVKALGSVPQTVFWRYTGEAPPNLPKNVKLVKWLPQKDLLAHPKARAFITHGGSHGVYEGICNAVPMLLMPLFGDQMDNAKRVESRGAGLTLNILEMTSEDISTALKAVINDKKYKENIKRLSDLHLDRPIHPLDLAVHWVEFVMRHKGAPHLRPAAHDLNWIQYHSLDVIAFLLAVLLLSLFISIKCCLCCCRRCCCKKGRTRKATKAKSH

SEQ ID NO: 7324 - protein, 207 aa, Eumeta japonica
MDNAKDGVIYFSMGSNLKSKHMPATMKREFLEIFAQLKQTVIWKFEETLPEVPKNVHMLKWAPQQSILAHPNCVLFITHGGLLSSTETVHFGVPIFGIPVFGDQFVNVGRSVNKGIAVKVDLSYNTPKELKKGNPRSTQQSKLSGNSEVFLAGIPRPAGAPGRGAGALGGARDQDARRAAPALARAQHALVPEDVPRPSGTCLHCII

SEQ ID NO: 7325 - protein, 855 aa, Fukomys damarensis
MATALPVPLRGLVGLLLLVCVTPWAECGKVLVVPMEGSHWLSMKDVVRKLHARGHQAVVLAPDVTLHVKGEDFFNLKTYTSHYTEEEFHHLILSHTKLIFETQHYLKTFLETTAIVKKGSAIYERSCVEMLHDSSLISQLNSSSFDVIITDPMIPCGAVLAKYLRIPAVYFLRAIPCGFDFEGTQCPNPSSYIPQLLTTYSDHMTFLQRVKNMLYPLALNHICHISFAPYARIASELFQRDVSLVDILSHASVWLFRGDFVFDYPRPIMPNMVFIGGINCIRRKPLSQTGGFNHVTRSNINLVCALALAIWEQGKESKGKGAMAMASQGPHPLVLGLLLCVLRPPVSHAGKLLVVPIDGSHWLSMVGVIQKLQQNGHEVVVLAPDALLHVKEGSSYTLKRYPVPFQREDVEASFVELGHDVFANYPFLQRVIRMYKKIKKDSALIFSGCSHLVHNKELMASLGESSFDAVLTDPFLPCGAIVAQYLAVPSVFFLNALPCGLHYGATQCPNPLSYVPSSMSLNSDHMTFLQRVKNVLIALAQKVLCDVVYPPYALLAAEVLQRDVTVQDLLASASVWLLRTDFVFEYPRPTMPNLVFIGGINCLHKNLLSQEFEAYINASGEHGIVVFSLGSMVSEIPEKKAMAIAEGLGQIPQTVLWRYTGTPPSNLAKNTILVKWLPQNDLLGHPKTRAFITHSGSHGIYEGICNGVPMVMMPLFGDQMDNAKRMETRGAGVTLNVLEMTSDDLGNALKKVIYEKSYKENIMRLSSLHKDRPIEPLDLAVFWVEFVMRHKGAPHLRPAAHDLTWYQYHSLDVIGFLLAIVLLVAFVAFKCCAYGFRKCFGKKGRVKKTQKSKTH

SEQ ID NO: 7326 - protein, 520 aa, Solenopsis invicta
MRVLSLIFLWLLYLSICDGYRLLGLFPFQSKSHFAMAEQLIKGLARKGHQIDVVSSFPLKKPYPNYTDIVTVPITIELVNKISYEIMKRSFSVNPTYAIGTGAGNDLCKLLENPKIKELAQPKNPPYDAVIMEVFAAQCFGIIAHLLKIPMIGIVPIGMLHPWLPHIIGQPENLAFVSNDNLTAPLSFGKRLCNVLCTLHNKWYFDYLTTQVQDRLIRKNFGPDMPSVRELERKLSLILINSHITLHGIQPRTPAVVDVGGLHVQTENETLQPELKKWMDDSKNGFIYFTFGSMMMIETFPREFLKVLYASLGKIAPVRVLMKIPFPEKLPPGLPKNIYISSWLPQIMILKHSNVKLFITHGGLMSMQEAISCGVPMIGIPLFLDQFNNINACVAKNIAIRLDVDTITEKSMDAALNAILKDPLYRENARNLSQRFLDRPMNAINTATYWIEYVIRYGENSLRSPAVDMTWWQLSLVDVFGFLLLCATIVIIVVVFIAQFMLKLIHKDTTTLYSRKLKTN

SEQ ID NO: 7327 - protein, 389 aa, Diuraphis noxia
MRWLPWSLQSVVTLAAALACATDAARILAVETMAGVSHWNFMSGVLRALVDSGHTITAFTPFPTADGDRPRDNYTEVDLSRELLVARDNQLADIVQKWRTPVGQALQWARRSRYVCDMVYGHPAMRDLLRLHRRDGRPPFDVVIVEPFLSDCVSYVAGQLGVPLIFASALPAIGLMERLHTGHVPNPATASHLVAGHGVPKTFAQRLTNSALFAYNDVAIEYAERVLKCTDPKEYDTAPTVTTSLMFINGHYVSEPPNPVLPSIIHVGGIHLRPPKELPEDILEFIEQSSHGVIYFTFGSTVKMSSIPEHIRNAFIDVLAQIPQRVLWKYEDELENKPKNVMMKKWLPQRDILMHPKVKLFISHGGISGLYEAVDAGVPVLGFPLFGDQ

SEQ ID NO: 7328 - protein, 533 aa, Sus scrofa
MTAGSRGLRPLILGLLLCALGPTVSWGGKLLVIPVEGSHWLSMVGVIQQLQQKGHDTVVVAPDATMYIKEGAFYTLKTYPVPFRKEDLREAFVSLGHTIFENDPFLQRMLKIYKKVKKDSALLLSACSHLLHNKELMASLAASGFDAVFTDPFLPCGPIVAQYLGLPAVFFLNGLPCQLDFQGTQCPNPLSYVPRPLSGNSDHMTFLERVKNMLVALSEGFLCSAVYSPYAPLASEVLQRDVTVQDLMSSASVWLIRNDFVNNYPRPIMPNTVFIGGINCASKTPLSQEFEAYVNASGEHGIVVFSLGSMVSEIPEQKAMEIADALGKIPQTVLWRYTGPAPPNLAKNTKLVKWLPQNDLLGHPKARAFITHSGSHGIYEGICNGVPMVMMPLFGDQMDNAKRMETRGAGVTLNVLEMTSKDLENALNTVIKDKSYKENIMRLSSLHKDRPIEPLDLAVFWVEFVMRHKGAPHLRPAAHDLTWYQYHSLDVIGFLLAVGLTVVFIAFKCCVFAYRKCFGKKGRVKKSHKSKTH

SEQ ID NO: 7329 - protein, 471 aa, Tribolium castaneum
MPTPSYSHQIVFNPLWLTLNSRGHHVTLFTTDPIKNANLSNFRQIDWSFAYQLWHEKHNVSDIIRNFNTNLLKCLNQYVEMMNDIIIQELEHPQVQEIINDKNEHFDLVVVEFLNPAMVAFSKRFNCPFIGMSPMDLTNFVHEALGNPISPALFPDFISRYDGEMNFFERVLNTFYYVGSKLYFKYYFYPKIDEIIKEYFGEDVPPLEQMQRNASMVFLNTNPIIHNIRPLMSNVLMVGGGTHFEGDTPLPEDIQKFLDGAENGAIYFSLGTNVKSKDLDQDTKTTFLQVFSELPYKVLWKFEDAKHPKIKLFITQGGLQSLEEAIYNGIPIIGMPVYVDQYSNVKRAIRKGMGIILDSNNVGKEILKKSIEDILNNEKYKKSAEKLSILLKEQPVSGLNQTVKWIEYVLKYKGAKFLKPAQIPTYQYLLIDVLTFFVALFIFSAYFSFVCLKLLVKCMKERRRVKTTKLE

SEQ ID NO: 7330 - protein, 534 aa, Ornithorhynchus anatinus
MMAAGFHSTHSIFLVLLLCMSCWRSAEGGKLLVVPLDGSHWLSLRTVLLEVQQKGHEALVVAPEATVHIKPGDFYILRTYPVPFSKEELQNHFGTSGHELFEKRPFLERIFRTYKKVKKTSTLLFSTCTQLLYNKELMKYLEDNKFDAVLTDPFLPCGSIVAAYLKLPALYFLRGMPCSLDFDSTKCPNPSSYIPRAFSGNSDRMNFPQRVKNVLLTWSQLFFCSFVYSPYAQLASEVLQRDMTIVDVLSYGSVWLMRSDFVMDYPRPIMPNMVLIGGINCAHRKPLSQEFQDYVNDSGEHGIVVFSLGSMVSEIPVKKAMEIAEALGRIPQTVLWRYTGKPPANLAKNTKLVKWLPQNDLLAHPKTRAFITHAGSHGIYEGICNGVPMVLLPLFGDQMDNAKRVESRGAGVILNVLEMTSEDLSNALKTVITDKSYKENIMRLSALHKDRPVEPLDLAVHWVEFVMKHKGAPHLRPAAHDLNWFQYHCLDVIGFFLVITLSVFFIFFKSCMFCFRKCFPKKEKAKKSQKNKSH

SEQ ID NO: 7331 - protein, 533 aa, Fukomys damarensis
MATALPVPLRGLVGLLLLVCVTPWAECGKVLVVPMEGSHWLSMKDVVRKLHARGHQAVVLAPDVTLHVKGEDFFNLKTYTSHYTEEEFHHLILSHTKLIFETQHYLKTFLETTAIVKKGSAIYERSCVEMLHDSSLISQLNSSSFDVIITDPMIPCGAVLAKYLRIPAVYFLRAIPCGFDFEGTQCPNPSSYIPQLLTTYSDHMTFLQRVKNMLYPLALNHICHISFAPYARIASELFQRDVSLVDILSHASVWLFRGDFVFDYPRPIMPNMVFIGGINCIRRKPLSQEFEAYINASGEHGIVVFSLGSMVSEIPEKKAMAIAEGLGQIPQTVLWRYTGTPPSNLAKNTILVKWLPQNDLLGHPKTRAFITHSGSHGIYEGICNGVPMVMMPLFGDQMDNAKRMETRGAGVTLNVLEMTSDDLGNALKKVIYEKSYKENIMRLSSLHKDRPIEPLDLAVFWVEFVMRHKGAPHLRPAAHDLTWYQYHSLDVIGFLLAIVLLVAFVAFKCCAYGFRKCFGKKGRVKKTQKSKTH

SEQ ID NO: 7332 - protein, 521 aa, Amyelois transitella
MAELLFFIISVFILSVDSARILAVFPMPSISHQVVFRPLVLELVKRGHDVVLITPDPSFPEGGGPINLTEIDMHDIAYKPWIEYLPEKYKDKLMSIHTLSIKSTLEITALINTKVVEVQLLSELVQELINDKTQHFDLLLVEACLRPTLVFSHIFKAPLIQVSSAGPIPYNLQTVGAPMHPILYPFAYSKKLSNLTLYDKYMELYNFLINQYVTYGNERIENDMLRRTVGPDVPTVSELTENVDMLFLNVHSLWESNRPVPPNVLYLGALHIKQEKELPKDLKSYLDSSKNGVIYMSFGTNVDPSMIPPQVISSFVDVFAELRYNVLWKWHTEDVPRLPKNVKISKWLPQRDLLMHPNVKLFITQGGLQSTDEAIEAAVPLIGIPMLGDQWYNVEKYVHHGIGVRLDIDTIDADKFKDAIDTVINDKSYHDNIRKLKSLMYDQPQTPLEKAVWWTEYVLRHGGRHLRSPAANLPWTVYYEIELLFYLLLFVIGARFLLVYLLFKLYKFVRGWLSKRKLKTN

SEQ ID NO: 7333 - protein, 515 aa, Helicoverpa armigera
MYKQIITMLLLVLFLSVLDGARILCVFPVPSYSHHAVFEAYTNALASRGHTIVRITPFPTKKNDSSNVTDVDVSLSKDYFKSLVDRSRLFKKRGVISETSSVTARNYISLVHMLIDQFSMESVRQLIESNNVFDLLVTEAFLDYPLVFSHLFGDVPVIQISSGHALAENFETMGAVSRHPIYYPNLWRNKFQNLNVWEIITEIYTELVLYLEFARLADEQTKMLRHQFGPNTPSVEELRQRVQLLFVNTHPLFDNNRPVPPSVQYLGSLHLDRNNDVDEQQTMDYNLMQFLNNSTNGVVYVSFGTSIRVSDIDDEFLFEFITAFKQLPYNILWKTDGMPMEHVLPKNVLTQTWLPQHHVLKHSNVVAFVTQGGMQSTDEAIDACVPLIGIPFMGDQAYNTNKYEELGIGRNLDPVTLTSHILVSAVLDVTVNNKSRYTDNIKALNRSTNYRTRKPMEKAIWYTEHVIDNGKNPILKTKAANVSYSKYYMSDIIVPVITFLVMTHLGQAIRRLVVI

SEQ ID NO: 7334 - protein, 533 aa, Panthera tigris
MAARSRGPRPLVLSLLLCALNPLLSQGGKLLLVPLDGSHWLSLFGVIQRLHQRGHDVVVIAPEASVYIKEGAFYTLKSYPVPFRREDVEASFTGLGLEVFEKKPFLQRVVETYKRVKKDSALLLSACSHLLYNKELMASLAESGFDAMLTDPFLPCGPIVALRLALPVVFFLNSLPCGLDFQGTRCPSPPSYVPRVLSRNSDHMTFLQRVKNMLILVSEGFLCNVVYSPYASLASEVLQKDVTVQDLMGSASVWLFRSDFVKDYSRPIMPNMVFIGGINCASKKPLSQEFEAYVNASGEHGIVVFSLGSMVSEIPKEKAMEIADALGKIPQTVLWRYTGTPPPNLAKNTILVKWLPQNDLLGHPKARAFITHSGSHGIYEGICNGVPMVMLPLFGDQMDNSKRMETRGAGLTLNVLEMTSEDLANALKAVINDKSYKENIMRLSSLHKDRPIEPVDLAVFWVEFVMRHKGALHLRPAAHDLTWYQYHSVDVIGFLLAIVLGVVFIMYKCCAFGCRKCFGKKGRVKKSHKSKTH

SEQ ID NO: 7335 - protein, 522 aa, Spodoptera litura
MLFLVYLISFCSLVLDHSESARILAVFPVPSISHQVVFRPLTEELARRGHEVTVITTDPAFPKGGTPANLTEIDVHDISYDLWKSVFIEPATGKMDDVVLTLKLIYDAIAAIADAQFQDKEVKKIIRDKNKKFDLLLSEAIVRPALVFSHIYKIPVIQISSFGGALDNYENIGASIHPILYPAITRQRLHNLTLLEKITEVYDDYQIRRVYRNLEEIENKILRKNFGEDVPPVSELNNNVDMLFLNINPIFEGIRPVPPSVVYMGGLHQKPNKELPAELKSYLDSSKNGVIYVSFGTNVDPTQFPADRIAVLVNTLSQLPYDILWKWNGDVLPGRTDNIRIEKWLPQSDLLKHPKVKLFINQAGLQSTDEAISAGVPLIAFPVFGDQSYNAERYEFLKIGKKMNLETLTVEQFTNAIKTVIGDESYRKNIEKLRNVMRDQPQSPLERAIWWTEHVLRHGGARHLRGPAANMSWADYLELELVFTLLLGLLAVIAILFVILRSLYRLILEKTTKRCVKKVKRS

SEQ ID NO: 7336 - protein, 524 aa, Trichoplusia ni
MIKNANMDLYLYFVSCYVLLINSIDSAKILGVFPVPSISHQVVFRPLMLELAKRGHDVTVITTDPVFPKGEAPANYTEVDVHGESYRIWREGIKKVSNVGKGELRIQADDLKTFPIMFERQMNDEDVKRLLRDNKHFDLLILEACFRPALIFSHIYKAPVILMSSFGAMFDNYDIIGAPTHPILYPSFSFQKLNNLTMWDKITELYTLYKRAYFYARNLDFEDSKIRKHFGENAPSLAELGNNVDMMFLNVHPVFVGIRPVPPSVVFMGGLHLKPEKHLPEDLKTYLDSSKHGVIYISFGTNVDPTLLPPARIQVLVKVLSQLPYDVLWKWNGDELPGRTANIRISKWLPQSDLLRHPKIKLFVTQGGLQSTDEAITAGVPLIGMPMFADQFFNVEKYQYHKIGVRLDLKYLTEEQFRNTITKVISDDSFRQNIIKLHGLMRDEVQTPLERAVWWTEYVLRHGGAKHLRSPAANISWAEYLELELVFTLLGGVIVAVALGVFVVITIYKQLLRKCFSASKIKRS

SEQ ID NO: 7337 - protein, 544 aa, Dictyocaulus viviparus
MVMISSLLDWKCSDVKINENIKTYNLNASVGMKKEYMDDQKGKFMYEDIPIWDSRFRNRMSKVSTFLVETCRNILENKEFLEWLQVQKFDLAFSHMFDVCPIGLIHYAKIPSWIWLNSGPIMDFVAHSMGVPKVSSYVPPLMMESTDQMNFIERVKSLIGHSLSVILWKRMFADPETEYFRKLIDANFPDVVDVAKNCPLVMVNSNELYELPRPTLSKIVNIGGLGVQIKDAKPLPSEIKRIVDDSIDGLVVFSFGSVAPSHKMPLTWKNAFLDAFRKFPQYNFVMRYEENDLLDKLPSNVHIFKWLPQADLLAHEKTRVFISHGGYNSVQEAIIAGVPMITIPLFGDQLKNAKTVEKLKFTVNLKKRDVNTDKIVNALDRLLKDDSMSSMSPNYTENKLKIVSYSRNVKRLSRMVEKKPVKPEHLLVSWADMSYMSPNYTESKIKIASYSRNVKRLSRMVEKKPVKAEHLLVSWAEFVAEFKTLENLIPAGNELNFIQYHSLDVIAFLLILVTLIILTSWKFLMYIYEKMYTFLVDSQKQKKA

SEQ ID NO: 7338 - protein, 232 aa, Hibiscus syriacus
MSKIIGRLRKLGVSVRFLLATKTSRTRSKEVTEVQSMNNNVCSGLIHKNRTLHLRMPREHQHYKVSGTDRVGFRLGGIEQAVHLGPKRKRYNIEPSGEMDERGRVRRKNERKRACSQGMGSSSVPLITLPFLGDQFCNQKLAVQIPKTAVSLGVDKPTMFGDEKSGFMLNKEQVQNAIHQLMDEGEEGIERRKRAKEFGVMAKTAVDIEGSSYCNITLFIQDIIQQSQKMSA

SEQ ID NO: 7339 - protein, 526 aa, Papilio xuthus
MCTRLLLAIAAIIITDANAARILGLFPHTGKSHQMVFEPLLRTLAERGHHVTTVSFFPLKNPPANYTDVSLEGIAGLGLETFDLSIYESPNLLLKIPIVKRIAKQLMEFHPLAGMALNVCGKALDWPPLIEALKGDYDVVLVENFNSDCMLGLLHVYGIRAPVVALLSCNILPWSGNRIGVLDNPAFVPVLSTPFTSRMTFAEKLENTFIQLYHNFWFYYSIQVKERELIEKRFGMKIPDLYELGKNYSLMMVNTFHALNGVRLTVPGVVEVGGMHLDHTRKVIPPYIEKFLNESEHGVILLSFGSLIKTSTIPKYKEDMIVNALGKLKQRIIWKFEGSGEEGTLTGNILRVKWLPQYELLQHKKVVAFIAHGGLLGMTEAVSAGKPMVVVPFFGDQPANAAAAAEAGFATVVPYIELTEEKLIKALEFVLSAETRLNARRVSSIWRDRQADPLETAVYWTERVIRWGHHAQLHSPARDMPLYQIALLDVIATLAVAILILLAISWYILSKVFRLLFGRESKLKMQ

SEQ ID NO: 7340 - protein, 532 aa, Pieris rapae
MILIRKEVKDLLSIQAIEVCNQTEIQFCSPIFLVKKPNGQYRFILNLKRLFKGFFRLRPCAPKYDYTWNVSEVLNYIENFLATGHRAQTICTIDRDLIKIESNAVYIQVTKLVKTSAPNRLQPFIRLPFFCDRPFVCPACAVIDYLNMTKNIRKDSKNLFVSYRKPYNPVTVSTISRWTKTVLKESGIDMNTFSAHSTRHASTSTALKRGVSIDEIKRTAGWTDSSTCFARFYNRPIRNVTEKYTTLVNSSSSSDETPTGIISIERRLQNQPLPPNVVMVWGIHKKPQKPLPNDLQKYLDSSKNGVIYLSFGSNVLSSILSPEKIQVFVRVFSRLSYDILWKWETDELPGKSENIKISKWLPQSDLLRHPNIKLFITQGGLQSTDEAITAEVPMIAVPLLGDQWFNAEKYLYHKIGMKLDMETITEDELENAIKTIINDTSYKDNIRRFNILLHDQPQSALDRAAWWTEYVIRHGGAKHLRSIAANMPWTEYFEIDFALKLTSLLLSIIFGVLVVIYFVSRRFFTKEKLKSA

SEQ ID NO: 7341 - protein, 533 aa, Ornithorhynchus anatinus
MALLPAWACRMTCGILLWLTVRHFAEGKKLLVMPIGGSPWLSLLPILQKIEKRGHEIVVVSPDVSERIKLNPSYTLKQYPVAIQREHVDSEISYFAKFLFSNQTFVRKYFGLYRLTAAINSLAISACRNIFINQDLMKYLEDSKFDAILLDPSYPCGQILAEHLSLPTVYFILTLLCGLEAEASQCPTPFSFVPRDFSSNSDHMTFLQRVNNVFFGVVQYLFCFSLYTSYENLAREFLQRDVTLKELLSHGSVWLYRSDFVFNYPKPVMPNMVFVGGINCMVRNQLSQEFQDYVNDSGEHGIVVFSLGSMVSEIPVKKAMEIAEALGRIPQTVLWRYTGKPPANLAKNTKLVKWLPQNDLLAHPKTRAFITHAGSHGIYEGICNGVPMVLLPLFGDQMDNAKRVESRGAGVILNVLEMTSEDLSNALKTVITDKSYKENIMRLSALHKDRPVEPLDLAVHWVEFVMKHKGAPHLRPAAHDLNWFQYHCLDVIGFFLVITLSVFFIFFKSCMFCFRKCFPKKEKAKKSQKNKSH

SEQ ID NO: 7342 - protein, 511 aa, Papilio polytes
MKKAVLLVVLAISSISAHNILCIFPAPSRSHATLGRGIVNTLLQAGHQVTWVTAYPDKSSNKNLRQIDLPQSREIVNAMDVTSEGRMSVSLVREFARNISIAALESPELRNVLINEKFDAVVSEWFFSDVESGYAAVQQVPWILLSGVVMHPYMEFLVDSVRSLPVTPFMMNDFPVPMSLWDRLFNTFSFGMFMFGNWQDSSRAEADYDKYFAPIAKARGVPLPPLSISRHNISIMLVNSHSSFAPAQPLPPNVIEIAGYHIEETTPPLPKDLQDLLDSSRNGVVYFSMGSVLKSAALPRKTKQELLKVLGSLPYTVLWKFEEQLEGLPKNVHIRPWMPQASILAHPNVKLFITHGGLLSTLESLRYGVPLLGVPVFGDQPGNALRAMRSGYARKVTFSPDMAPELEKELKHMLADDKYYNKAKELSKLFNSRPVTQRQLISHYIQLAIDTKGAYHLRSKSLLYKWYELWMLDQLAIVVAILLLLYLLLKKIISALTKKNIKEVKKSKKNK

SEQ ID NO: 7343 - protein, 494 aa, Ooceraea biroi
MLESLMKGLANKGHQIDVISPYPQKKPYPNYTDIAKWATEEYVNNVTYEFVQVLAGSNPKIFATLFGSNICEAHLGNPVIQKLVRDPPKDPPYDAMIMEVRNNSLVLMKGLISKGHQVDIISPFPQKKPYSNYTDIANLTAPISFTNNMTYEFIVQVLGSIPWTSSATSYGNDICEAHLGNPVIQKLVRDPPKDPPYDAMIMEVFGAHCFTVIADLLNISLIGVSTTTLYPWLHELIAQPENLAFVPNNRLNVEFPMNLWQRTHNVFSFLYSKLYFNYHTRMQDDLVRMYFGPNLPSVQKMKLALFLVNSHIALHGIQPMTPAVIQIGGIHIRDDDSLLPQELKKWLDDSKDGFVYFTFGSMVLIETFPRKILDVFYASLDKIAPVRVLMKVPNPKKLPAGLPKNIRTFSWLPQLKVLKHPNIRAFITHGGLMSILEAIFCGVPMIGVPLFADQFKNVETSITRNVAVKLDVHKVTVKDMDAALNAILHDPRYM

SEQ ID NO: 7344 - protein, 445 aa, Eumeta japonica
MRECYPVKILALFPYNGRSHHIYFSTFVEELAARKHSVVVVNYFPLKNDSNLRQISLQEGGITRDTVEIEDSDGASGIFKEFSFAYDTAKAFKHIANDNCRRLVNNRHIKEMIDSEERFDVIIVEQFVTDCGFAIANRFKAPIVGMAAHVMFPWTYSRLGADDHPAFVPNHFTGAGPTPDLWERIKSTLINLFFNVYHRHFIQRSDNEIVREAFPDTPNLVTLVNNMSLLMLNQYFPLTGSRVYGANVVEIGGMHVKRQGIRDRNLQSFLDSAKNGVIYISFGSVASDLPKRKMEVILNVIKHSELRFIWKIENTDDFTIPSNVLTRKWLPQVDILCHENVLGFISHSGMLSSSEAMHCGVPVVSVPLFGDQFANAASARAVGLGVTIHLEDLEENTLDVALKTILRERHRWPSRRQGRLPLTVVLHGRQIAAPATVRPRIDVRK

SEQ ID NO: 7345 - protein, 682 aa, Temnothorax longispinosus
MLDQLRQMDTCTLGTQRLRRLFTTTTITTSTHLHYLLLSVLLAILVCDQIANGYRILGVFPLHGKSHWIMQEALMKELARRGHQVDVVTHFPLEKPIPNYTDISLKGSLPQVMNNMTAAEVLGFSTPSISNLVAMAGNNICALLDHPKIQELIKNPPQDPPYDIVIQELFAAPCYLAFGRHLKVPIVTTVASAFHDWLNEVSGNPMNPAYVPSLFSEYGQNMNFKERLTNFLLTHYLSWQMHYYTNAQLKFVLLSVLFAILVCDQIANGYRILGVFPLQGKSHWIMQEALMKELARRGHQVDVVTHFPLEKPIPNYTDISVKGSLPQVMNNMSAADLKAGFSTPSISMFVAMAGNAICALMDHPKIQELIKNPPQDPPYDIVIQEMFAAPCYLAFGRHLKVPIVATVASVFHDWLNEVSGNPANPAYTPSFFSEYGQNMNFKERLTNFLLTNYLSWQLHYHTNTQLKFVKEHFGMDLPHIKDLYSDVALYLVNSHHSLNGIRPMTTNVIEVGGLHLKDDDNPPSPEVQKWLDESKDGCIYFTFGSMVRIETFPKEMIQQIYASFEKIAPVRVLMKVAKKEDLLPGLPKNVMTQSWFPQISVLKHKNIRAFITHGGIFGTQEAVYCGVPMIGIPLFGDQIVNIKNYVNKKVAISLNSVTEVTEEKLTSAINNILKDPSYRENL

SEQ ID NO: 7346 - protein, 532 aa, Gallus gallus
MALVLPSHPQVSVSLLLLLSVLSLAAGGKLLVVPVGGSHWLSMQEVLDGLRQKGHEIVIVSPEFNLFVKPSNNFTMKLYQVPVTEEEINGDFQAFLKEAFEEGSFVERFLRVRERVKKLYELGFIACEQLLKNKELIRYLEESNFDALFTDPVLPCGAIVAEHLSIPSVYLLRGIPCGLHLEATQCPSPPSYIPRLFTDHTDHMNFLQRVKNVIFDTSNLFLCDFLFKPYEKLASEFLQRDVTVLDLLRKASIWLLRYDFVLDYPGPLMPNIIVVGGVNCAHKQLPQEFEAIVNASGEHGIVVFSLGSMVSEIPMKKAMEIADALGSVPQTVLWRYTGEVPPNLPKNVKLVKWLPQNDLLAHPKTRAFITHGGSHGVYEGICNAVPMVLMPLFGDQMDNAKRVESRGAGLTLNILEMTSKDISDALKAVINDKKYKENIQRLSDLHLDRPIHPLDLAVHWVEFVMRHKGAPHLRPAAHDLNWIQYHSLDVFAFLLAVVLLSLFISVKCCMFCCRRCCFKKGRKSKSGKSKTH

SEQ ID NO: 7347 - protein, 689 aa, Camelus ferus
MGPQVLAGLLLCLCAGPWAEGGKVLVVPMEGSHWLSMREAVRELHARGHHAVVLSPEVNMHVKPEDFFTTETYATPNTQDEFDYVMMGQVHVLFERVNFLKMFWNTMVGLKNASLIFQRSCEALLSHKDLIRRLNASSFDVVLTDPVYPCGAVLAKYLSLPAVFFLRGIPCDFDVEGTACPNPFSYVPRLLTRNSDHMTFLQRVKNMLYPLALKYICHASYTPYQRMASELLQREVSLVEVFSSASVWLFRGDFVMDYPRPVMPNMVFIGGLKNASLIFQRSCEALLSHKDLIRRLNASSFDVVLTDPVYPCGAVLAKYLSLPAVFFLRGIPCEFDVEGTACPNPFSYVPRLLTRNSDHMTFLQRVKNMLYPLALKYICHASYTPYQRMASELLQREVSLVEVFSSASVWLFRGDFVMDYPRPVMPNMVFIGGINCANRKPLSQDFETYINASGEHGIVVFSLGSMVSEIPEYKAMEIADALGKIPQTVLWRYTGTPPPNLAKNTKLVKWLPQNDLLGHPKTRAFITHSGSHGVYEGICNGVPMVMLPLFGDQMDNAKRMETRGAGVTLNVLEMTSEDLEKALKTVINDKSYKENIMRLSSLHKDRPVEPLDLAVFWVEFVMRHKGAPHLRPAAHDLTWYQYHSLDVIGFLLAVVLTVVFIAFKSCVFAYRKCFGKKGRAKKAHKSKAH

SEQ ID NO: 7348 - protein, 590 aa, Dendroctonus ponderosae
  MOD_RES (284)..(320): Any amino acid
MLSGNSRALQCWTLLLILSGALGAKILGIFPTPGRSHYILESTLMRALSDAGHQVTIVSPFHEPYQSAGNGSYRQIVLTGVAEAQKGPKNREIPQRRRGINLFERASMNPLSAIYVMNKIGLKQTESTLQHAAFQALIHSGERFDAVVVGQFMNDALKGMAHHFGGHLILFSSVGTSTWVSKSINEFLSKIGKKFQNSNRAQSDPVGFARHSRQMSQQPGARRHAPDKERTSRARFFGAKLIKICEQVNHLVGNPSMPSYTPEMILSYPARMTYWQRATNALVXXXXXXXXXXXXXXXXXXXXXXXXXXXXXXXXXXXXXSLVLMNTHESIAFPTSAVPCMKHIGGFHVKAPAPLPNELQAFLDQAAEGVVYFSLGSNVNTSHLPAPMRQAILEVLAQRPQRILLKFDEPPATPLPANVMQRAWFPQQDVLAHPNVRLFITHGGFASTIETVHYGVPIIAIPIFGDQRMNAIYAETKGFGRILPWQSINVASFGRMVAEVLGNPRYREAARRKSQLLRDREVAPLATAVYWIEYVLRHNGAPHLRVASLELAWYQYYLLDVYLPIVLLPVVVWQVLRRLMPRRGQKIKTS

SEQ ID NO: 7349 - protein, 245 aa, Tyto alba
EFEDIVNASGEHGIVVFSLGSMVSEIPMKKATEIADALGSVPQTVLWRYTGQAPPNLPKNVKLVKWLPQNDLLAHPKTRAFITHGGSHGVYEGICNAVPMVLMPLFGDQMDNAKRVESRGAGLTLNILEMTSKDISTALKAVINDKKYKENIKRLSELHLDRPIHPLDLAVHWVEFVMRHKGAPHLRPAAHDLNWIQYHSLDVIAFLLAVVLLSLFISLKCCLFCCRRCCCKKGRTRKPTKSKSH

SEQ ID NO: 7350 - protein, 524 aa, Zygaena filipendulae
  MOD_RES (280)..(280): Any amino acid
MANAARYILLIGILYINFIKICEAARILAVYPTPSISHHKFFWPFTEELAKRGHEMVVITTDLAYPKGEAPPNITEIDLHDISYDIWQRDWVTELSGRTNDQYYILRGLITTMAKVVIAQMKSDEVQAILKDERGFDLLLIEDWTRTALGFSHVFKVPTILVSSFGSLFGHYGDLGVQMHPLLYPILSSQRHYGLSLWEKIYEFYRVLCVQYFYITYEEEENKMLRQVLGDDIPTLSELSKNVDLLLLNHHPVWDFNRPVPANVIYVGGKRPIPRKELPXDIKSFLDQSVNGTIYMSLGSNVKPSILSKDRIGMMMKVFSELPYDVMFKYDQDELPGKPSNVRISKWFPQPDILRHPKVKAFITQGGLQSTEEAIETGVPVIGMPILGDQWFNCAKYNHFKIGFGLEFESLTEEIFKNAIKSVIEDESYRRNIKNLRELLYDQPQSPMDKAVWWTEHVLRHSHIGKPYRSPRAEITWVEYLELKLVAVLLTIFALTSIIVAKIAILLFKFLSKSISTSVKVKMN

SEQ ID NO: 7351 - protein, 527 aa, Copidosoma floridanum
MGVPRNRSLLVISIVLVACCSQCVDGLRILGLFPLHGKSHFSMCESLMKGLAAKGHQVDVYSHFPQKKPVPRYTDYSLDGTLPAVVNNITYDYIQRFDSPNIKFMMEELANKVCELMSTSEFQKLFQRLEKNQPYDVVIMEVFVSNCYLAWGRFLKIPMVGVMTSSLIDWYNEPLGNPLNLAVTPSSWSHLYHPMNFWERLTNAFMYNVIVMQTKYYIRCQDKYIEQYFGTGYPNSNDIIRDLDLLLVNMHHSVNGIRPFTPAIVPVAGLHIQDDDPNLPKAVQKWLDESTSGCVYMSFGSMVRIETLPKAILTGIYETFKKLAPVRVLLKIAQPQELPPGLPSNVMTQTWFSQMKVLKHKNLKAFVTHGGLGSTQESLSAGVPMIGVPLFGDQHINVRSQVRRNIATMVDIKNFDTNAFYSAVKEVLGNPIYKKNAEEVARDFFDRPMSPMDEATFWVEYIVRHGKQSLKSPVVDMPWYQAHMIDVYGFVLLVLVVACYVVKAIVRKILRLFCSSSSAPGKKKKRE

SEQ ID NO: 7352 - protein, 533 aa, Rhinolophus ferrumequinum
MAAGSQGPHPLVLGLLLCALGPAVSQGRKLLLVPMDGSHWLSMHGIIQQLQQRGHDIVVLASAASVHITEGEFYTLKRYPVPFRREDAEASFISVGHNAFERQPFLQRVIKTYKKVKEDSAMLLSACSYLLHNTELMTSLAESNFDVVFTDPFLPCGSIVAQYLALPAVFFLNALPCSLDFQGTQCPNPPSYVPRSLSFNSDRMTFLQRVKNVLIALSENFLCSVVYSPYASLASEVLQKEVTVQDLMSYASVWLFKGDFVKDHSRPIMPNMVFIGGINCASKKSLSQEFEAYVNASGEHGVVVFSLGSMVSEIPEKKAMEIADALGKIPQTVLWRYTGTPPSNLAKNTILVKWLPQNDLLGHPKTRAFITHSGSHGIYEGICNGVPMVMLPLFGDQMDNAKRMESRGAGVTLNVLEMTSEDLANALKTVINDKSYKENIMRLSSLHKDRPIEPLDLAVFWVEFVMRHKGAPHLRPAAHDLTWYQYHSLDVIGFLLAIVLGVAFIVYKCCAFGYRKCCGKKGRVKKAQKSKAH

SEQ ID NO: 7353 - protein, 1187 aa, Sorex araneus
MASRVLAALLPLSVCLLLVPGPTEAGRLLVVPMDGSHWFTMSSVVEQLVQRGHEIVVVMPEVSWQLKKSFNVTVKTYSLSYSLEDVNREFKRYVDVQWKIRDQNFLSMMMATPTQFFEYFFSHCKSVFDDRKLIRYLEETSFDAVFLDPFDMCGLIIAKYLSLPSVVFTRGVFCHYQDEGTQCPSPLSYVPRGLLALSDTMTFPERVWNLLFHVQEHLFCRYFLKVATDVASEIFQTTITPYDLYSQASIWLLRTDFVLDYPRPVMPNMVFIGGINCHAGKPLTEVSWQLKKSLNFTAKTYSLSYSLEDLNHEFKIFADHQWKIRGKSLLSALMSLSSRFFDNFFSHCKSVFNDRQLVRYLEETSFDAVLLDPLDMCGLILAKYLSLPSVVFTRGGFCHYQDEGTQCPSPLSYVPRRLLAFSDTMTFWERVRNLLSLVEEHLFCHHFLKVATGVASEIFQTTITPYDLHSHVSIWLLRTDFVLDYPRPVMPNMVFIGGIKCHAGKPLTEGGKMLVVPMDGSHWLSMRKLVQELHSRGHQIVVVVPEVNLYIKAEDFFTLKSYAVPFTQEEFQHILVGQGKLIFEEKYSLVIFWKIMDILKEISQLFLSSCRELLNNKDLMVSLRNSSFDVLLTDPVYPCGAVLAQYLSIPSVFFLRDIPCDYAFEGTQCPNPFSYIPKYLTAHSDHMTFLQRVKNMLYPLSLTYACNIGLLPYEGLASEVLQREMSLGEIFGSASVWLFRGDFVLDYPRPIMPNMAFIGGINCAYRKPLSQEDSALFLSFCSSLLYNKELMASLAASNFDLMLADPFLPCGPIVAQHLGLPSVFYLNAMPCSLDYQGARCPNPPSYVPRSLSMNSDHMTFLQRVKNVLIASTESFLCSAVYSPYAQLASEFLQKTVTVQDLMSNASVWILRSDFVNYHPRPIMPNMVFVGGINCANQKPLAQEFEAYVNASGEHGIVVFSLGSMVSDIPEKKAMEIAKALGTIPQTVLWRYTGTPPSNLAKNTKLVKWLPQNDLLGHPKTRAFITHSGSHGIYEGICNGVPMVMLPLFGDQMDNAKRMESRGAGVSLNVLEMTSEDLSQALKAVIYDKSYKENIMRLSSLHKDRPIEPLDLAVFWVEFVMRHKGAPHLRPAAHDLTWYQYHSLDVIAFLLSIVLGVLFVVYKCCAFGCRKCFGKKPRGKKSHKSKAH

SEQ ID NO: 7354 - protein, 959 aa, Tribolium castaneum
MPFPVKSHSILFETLLKRLAEKGHEVDYVTHFLSEKTPERYNELSIRGSLPLFHNNFSVKALKDHSVYETIKFVTTSGGVDANSAIMKTAVLQSLKNTTKQYDLIITHLFGSDAMLGFGHLFNAPIVSITTCAVLPWAHGRIANPDNPSYVPNFYTSFLPKMNLYERIENTILWIMTRIWYNYLTMAPSNRLVKDFFGPDTPSLENLIQNTSLVLVNSHFSMQQVRPTVPNFIEVGGLHIREPQPLPKDLENLVSNNTFGVVYLSMGSMVITETFEPEILQAMFDAFAELPYTVLWKASPEKFPKGLTIPENIHFKTWMPQIDILCHPNVKLFISHGGLLGSQEAVYCAVPRIGIPLYGDQEANIHKSEKLGIAIKLAYGSITKDSFLETVKRVLEDLSYRHNVQKISQIFKDRPMSPLDTAVYWVEYVIKYKGAPHLRSVGADLPWYQYYLIDVAVILLFGLFVKFQDLENLVSNNTFGVVYLSMGSMVRTESFKPEILQAMFDAFAELPYTVLWKASPEKFPKGLKIPENIHFKTWMPQIDILCHPNVKLFISHGGLLGSQEAVYCAIPRIGIPFFDDQELNIVTYNELSLYGTLPDHVNNLSIEGMQNQTIYQRIKFMTRTAGVEAFSRILQTPVLRNLRNTTKKYHLIIVHQFGCDVMLGFGFLFNAPVISYVTSVSPPWIDDRIGNPDNPSYIQSHFSRSSAKMSLYERVENTIFWISARFWYSFFSGRSDQLVKDFFGHKTPSLENLIRNDSLVLVNSHFSLQQVRPLVPNFIEVGGLHIREPQPLPKDLENLVSNNKFGVIYLSMGSMIMTETYDPEILQAMFDAFAELPYTVLWKASPEKFPKGLKIPENIHFKMWMPQIDILCHPNVKLFISHGGMLGSQEAVYCAVPRIGVPIYADQERNIVTSEKLGIAKKLSYDHINKNTFLHTIKELIEDLKYVWLKKKLLLSNFC

SEQ ID NO: 7355 - protein, 534 aa, Caenorhabditis remanei
MHVNSLLFLLSIFGTCVFGKNILIINPIFGFSHVKFMTQMANVIADHGHNVTLFQPFHIPLKNMDGLVKNKNIEILNYYPDHYDELLNTESPTFPMFWDSHLMNNPVLQSVMMPRMIVKELQRTDEQILLDTKLHETLKNKKFDVAIAETFGISGFYLAHFLDLPCIPVMSAVRFQVFNELFGQLSSTGYIPQIGSKRASEAGFLDRLNDVYMKFFDKITVEKMGQLQNDNFENALGRPLPNWKDLISESPVYITNSNPYLDFAVPTTATIVHAGGITIDLKKLRNVGPLPEEYEQILQERDSTILISFGSVIRSYQMPDNFKAGIIQMFESLPDVTFIWKYEKDDVEFQKRLPKNVHLKKWVPQPALLADKRLKVFVTHGGLGSTMEVAYTGKPALMVPIFGDQPQNAYMLERHGGAIAYDKFDLQDGDKLTKIMKDMVTNPKYNENAHALLEVLSNQPIDPKMNLMKHLDFAIKFPKLRSQVPAISHVGIIAHYYLDVFAFLTSVAVVLAYCTFKLLRKIPVRLAAKKTKND

SEQ ID NO: 7356 - protein, 533 aa, Apaloderma vittatum
MAVVLRAHPQLAATLVLLLSVLSSAAGGKLLVVPLDGSHWLSMREVLDVLSQRGHEVVVVAPEISLHIKPTKNFVMKMYPVPFTQEELNNAFLRTSQEVFEGGSFLERFLKTYDRLKNASAMFLSTCAHLLSNKELIQYLQESKFDAVFTDPILPCGQILADHLSVPSVVFVQQIPCGLEFEATQCPNPPSYVPRIFMSSSDHMTFTERVKNHLVGISGNWLCYLFYLKYENLASEFLHKEVTILELFSKASIWLMRYDFVFEYPRPIMPNMVYVGGINCEQKEPLPKEFEAIVNASGEHGIVVFSLGSMVSEIPMKKATEIAEALGTVPQTVLWRYTGQTPPNLPKNVKLVKWLPQNDLLAHPKTRAFITHGGSHGVYEGICNAVPMVLMPLFGDQMDNAKRVESRGAGLTLNILEMTSKDISTALKAVINDKKYKENIKRLSDLHLDRPIHPLDLAVYWVEFVMRHKGAPHLRPAAHDLNWFQYHSLDVIAFLLAVVLLSLFISVKCCMCCCRRCCCKKGRTRKPTKSKSH

SEQ ID NO: 7357 - protein, 430 aa, Fopius arisanus
MGIWKFWKWMLLVIFVGECGGYRILGIFPFNAKSHMMMFEQLMKGLARKGHQVDVVSPFPLKTPVRNYKDIEIPSALPKLVNNMTYEGMKEIMKNNIVKFIALEAGNRVCAEGLEHPELQRLIKNPPKNPGYDLVIVEIFSAHCFMAFGPHFNVPVIGISSAALYPWSNDIIANPENLAFVPNNLLEYKKSMDFWERLYNFLHTYYYKRYFDYHTSPQNDIIRKHFGPDSPGIRELERDLALIIVNSHYALNGVRPTTPGLIEVGGVHIQDDGPDIPQDDRKWLDESPEGFVYFTFGSMMQIESFPPHVLDILYKSLGKISPVRVLMKIPRRELLPPGLPGNIRTFSWMPQLKVLKHPKIRAFITHGGLMGTQEAITCAVPMIGMPIFADQFVNIDLYVAKKIALRVDPVQMTEEKLDWALNEILFNPVY

SEQ ID NO: 7358 - protein, 273 aa, Capitella teleta
TTFDQIYKDSEMWIINMETVCSDQPRVHAFHYQFIAGLGWTPAKPLPAGNIQSFADGADNGLIVVSFGSALKTIPKELMDVLMETFENLPQRFIMRFDSEHPANTPSNVMLVSWLPQNDLLGHNNTRLFITHGGNNGQLEGLFHGVPMLTLPVFGDQFYNARRAFLRGHGLFLDLKSSSARQIHGAITELLLNPKYRKSVQRCSRILLDMPEPRKALSFWVNHVLKFGGSHLKPSSMQLPLWKFFMLDVAAFLAVSAAIMSACIFMCCRCTAK

SEQ ID NO: 7359 - protein, 530 aa, Trichinella nativa
LKHRRVRKQITRAMQINITLYVFICLTYGFISELFSKEFRGNVLHFAFGISKSHVLFNERLANVLSENGYKVHIVFAPVAPDVDLPDFRNNKNVEVIKINFTITESVFTLGKQWQNDIFKKDSIKNIFVIGRMFQRLLIDSCKIMSENSALKQHIETIQYDVLLNYCLDICPLAFGWKGKIPKTICISPSTIIFESVASIVGTPIRPSFIPNGGSAYSDKMTFFGRLKNSLLSSFMLLYPQLPVSAHKTEENIFRTIYGNDFKSITELNSNIVGMLINGEASLEFPRPLLPTVLYLGDLLPLKSSRLSKEWQHVVEAENAGIILFSFGSVIKTDLIPWEIQKELLDAFSRFPNYTVVCKLSVDESQKHYLPPNVKLFDWIPQRELLDHPKLKLFITHAGYNSLLETAKVGVPMITIPLFGDQLSNALRAERQKLSLVLSKLEITSENLENKMKIILENETYFNRAKQFAGFIHDKPLSNADMLIRYMDITIRRQQLVRPAVLNFNVMQEFNFDSVILATSAFLILLSLVR

SEQ ID NO: 7360 - protein, 532 aa, Pelodiscus sinensis
MAPSSQSEHPIVSRLLLFLVVCSLAEGGKLLVIPVDGSHWLSMCQVLEKLSLKGHEIVVVMPEVSLLIRPSLYYSVKTYPVPHTKEKLDVFFQSLIYLIFDDGPILKKVFIAYESFTSVNTMMLTTCKHFLLNKEVMKYIEEVHFDAILTDPVLPCGSIVAEYLSIPSVNFLRGVPCSLDKAIQCPDPPSYSPKFLTSYTDHMSFTQRVMNFLFGALEHLFCKLLFSQFDSLASEFLQRDLTILELLSQSSVWLMRYDFAFEYPRPVMPNMVFIGGINCGQKKKLSWEFESIVNASGEHGFVVFSLGSMVSEIPMKKAQQFAEAFGTIPQTILWRYTGQPPPNLANNTKLIKWLPQNDLLAHPKARAFITHGGSHGIYEGICNGVPMVLMPLFGDQMDNAKRIESRGAGVTLNVLDMTSKDLSAALNTVIYDKSYKENIMRLSALHLDRPIHPLDLAVHWIEFVMRHKGAPHLRPAAHDLNWIQYHSLDVIAFLLAVVLVAMFISWKCCLFCCRKCFCKKGRVSKSSKTKAQ

SEQ ID NO: 7361 - protein, 531 aa, Mus musculus
MAPADFPASLPLCVCLLLASGLAQAGRLLVVPMDGSHWFTMQTVVEKLLHKGHEVVVVVPEVSWQLTKPLNFVVKTYAVSHTQEDLNREFKIFIDAQWKSQQEGGILPLLDSPAKGFFELLFSHCRSLFNDKKLVEYLKQTSFDAVFLDPFDVCGLTVAKYFSLPSVVFSRGIFCHYLEDAAQCPSPPSYIPRMLLKFTDTMTFKERTRNLLAYMGERAFCHKFFKSAADIASEVLQTPVTMTDLFSPVSIWLLRTDFVLEFPRPVMPNVIYIGGINCHQGKPLSKEFEAYVNASGEHGIVVFSLGSMVSEIPEKKAMEIAEALGRIPQTVLWRYTGTRPSNLAKNTILVKWLPQNDLLGHPKTRAFITHSGSHGIYEGICNGVPMVMMPLFGDQMDNAKRMETRGAGVTLNVLEMTADDLENALKTVINNKSYKENIMRLSSLHKDRPIEPLDLAVFWVEYVMRHKGAPHLRPAAHDLTWYQYHSLDVIGFLLAIVLTVVFIVFKCCAYGCRKCFGGKGRVKKSHKSKTH

SEQ ID NO: 7362 - protein, 520 aa, Trichoplusia ni
MGVLLYFLTSYILLINCNEAARILVVVPTPSVSHQVVFRPVVQELVKRGHHVTMITTDPAFPDGGGPANLTEIDVHDISYRVWRQHLMKATQGNQEDLYFQMKTIVTMALEVFEYQYNDEKVQQLINDKNQKFDLIIVEALSRLALGYQHVFKAPLILMSSFGATIDNFEALGVPTHLLLYPMIIRQRINNLTIWDKISEVYHFAKLYTMFESCMEDDEKLLRKLFGPDVPSVREFYNRIDMLFLNENPVFSGIRPVPPNLIYMGGLHQHPVKELPKDLKSYLDSSKNGVIYISFGTNVDPTQLPADRIQVLVKAFSQLPYDVLWKWNGDELPGRTENIRISKWLPQSDLLRHPKIKVFVTQGGLQSTDEAITAGVPMVGFPMLVDQWFNVERYETHKIGIKLDIATVTAEKFKNTLLKVIEDDSYRQNTVRLNILMRDQPQAPLERTIWWIEHVLRHGGAKHLRSPAANISWAEYLELELVLTLLAGLLTAISLVVLCIYYLFKFFVKNGVSNSKVKRS

SEQ ID NO: 7363 - protein, 522 aa, Bombyx mori
MFKLTFLVCCILATQSVSDAYKILVVFPMPGKSHSILGYSVVKHLLKAGHEVTYVTPFVEDNHHPNLTQVDVSSNMRLIPKGGLDLKRVLDKEVNVIDNGFMFYFMKQIQEATLEHEQVKKLLEDPNKTFDIVIVEWMYCELGASYAAVFDVPLIWLSTMEPHWLVTRLIDGNLNPAYNGDSMSSSIPPFTFLQRVKELWIQIHTSFILLNDDQERSYDRLVRPLIEKKGRKAPSFEDLKFNASLVLGNSHVSLGEATGTPQSYKPIAGYHIEEVVKPLPADLKEIMENAKHGVIYFSMGSNLKSTEMPDEMKQNLVKMFGELKQTIIWKFEEDFPNLPKNVHIVNWAPQPSILSHPNCVLFITHGGLLSTTESVHFGVPIVGIPVFGDQFINVQRAVKRGFAKKVDFSYSMVGELKVAIQEILSDSSYRTRIKELSLIYHDRPVSPGAELVHWVEHVARTRGALHLRSPALHVPFYQKLYLDLLAVVLIISLIFYRKICLIKNLLLSFFQTNEIKKKKKRN

SEQ ID NO: 7364 - protein, 441 aa, Aethina tumida
MYEKIPKIVKKLMAKMDENIYSQMISHFEVMRMFEEEILGSKGVLELLGNKNIQFDLVMMEMISNIGLGFGYKYKAPVVGISSVGGLAQIHEVMGNPRHPAFVPEIFLGFGERMTFLERIQNTAFNVWYRYYHHWINVPDWDKIARKFFGNEMPYLGDLEKEIPLVLVNTNPVLDYVKPSVPGVIEIGQMHIKPKKPLPNDLKDYLDNSKKGVVYFSLGSNVLSSNTAPEFLNAIKEAMSELPYDFMWKWETDDLPNKPQNVLIRKWFPQQDILDHPNIKAFVTQGGLQSMEEAITNGVPMVVIPYFGDQPYNAKRMVHMEIAKELNYKMLTKENFKQAVTEVVENDKYKRNVVKYSKLLVDQPMTGLEKAVWWIEFTLRHKGDFNLRGYGADVPYYQYFFLDIIAFALIIVLATILSVRKIVNIIIRVNARKSSKKIKRN

SEQ ID NO: 7365 - protein, 523 aa, Galeopterus variegatus
MAGRRALLLVGFLLPGVLLSEAAKILTVSTVGGSHYLLMDRVSHILQDHGHNVTMLHHGGYSLMSDFEEEKKSYHVISWLLPEGDNKEFKKSINFLMGETLRGRGLFENYLKFLEQLGFQCSHLLGRRDIMDSLKNEDFDMVIVEFLDYCPFLIAEQLGKPFVSILSSSFGTVDFGLPSPLSYVPVYRSLLTDHMGFWGRMKNLLMVFDFSIKEWQTQSMFDNTIKDHFPEGSRPVLSHLLQKAELWFVNSDFAFDFARPLLPNTVYVGGLMSKPTKPVPQDLENFITKFGDSGFVLVSLGSMVSIHQIEEVLREMNSAFARLLQGVIWKYKSSLWPKDVKLAGNVKLVEWLPQNDLLAHPSIHLFVTHGGQNSIMEAIHHGVPMVGIPLFGDQPMNMVRVEAKEFGVSIQLKDLTAETLALKMKQVIEDKRYKSAAVDASIIMCSHPLTPAERLVGWINHILQTRGAAHLKPYSFQQPWHERYLLDVLSFLLAFTLVTVWLCGKLLGMVAKWVCGSRKLKKT

SEQ ID NO: 7366 - protein, 522 aa, Culex quinquefasciatus
MYRIAVILFCAFEFSFGKNILILSGVPSPSHSIWIRPLATALAADGHNVTVVSPDIEKKPPVNLTYVHLETLYSEMYNTSQRDNLQFFEMADEGPLKMLSFLDEFTIIMCKASIRSVGFKHLMDYPKDFKFDLFMSDYMIGPCLASLLMYRFGSPPYIPVAPYNALATSAPLIGSYAYSASIPNHSFDVPLKMSFLERVQNFFYDSYEELRKDTYLYPETDAIIRSVFPNAPSARELQSNIKLLFINNNPLIQYKEPMMPNVIPVGGMQIRPPKPLPDDLNRIVSKAKNGFILFSLGSNARSDLLGPDRIRCVMTAMKAFPQFQFLWKFESDESKLPMAVPENVFIRAWMPQNDLLGHPNIKLFMTHSGLLSTQEAIWNGVPILGFPLFADQFRNINYCSSIGVAQRQSIQRCNAQELIETIRELTGNPSYNAKMKRLSQLVQDQPETPLQRAVWWVNWVLRNPDVSVLQSSVMQMGWMQKYLIDVFLFIVLSTVLIALLIIIFSMKVIKQLGKSSTKQKRQ

SEQ ID NO: 7367 - protein, 520 aa, Spodoptera litura
MSVLWCIVSAYIIVVSPIQASRILFYIPTPSISHQVVFRPLAQTLASRGHDVTVITADPAFPKGKSPANLTEIDVHDMSYEIWQEGIMKETRGDTGDLKAQLAPVMRTLYTVFDKQLQEEKIQNLINDKNKQFDLVILEGVLPPLLVFSHIYKAPAILMSSFGGLYGHYESVGAPTHPLLYPLNIRQKLGDLTLWDKLRELFVYYAVENLWYSFYDLGNSILKKHFGPDVPNVWELMDNIDMLFLNIHPMFEGIRPVPPNVIYLHGLHQKPKKDLPQDLKSYLDSSKHGVIYVSFGTNVDPALLPPEKIQILVRVFSQLPYDVLWKWSKDELPGRSPNIKIAKWFPQPDLLKHPNVKLFITQGGLQSTDEAITAGVPLIGMPMLGDQYFNVERYVYHGFGIRLDMEALTEEKLKHAINATVEDESYRRNMERFRTLINDSPQTPLERAVWWTEYLLRHGDAKHLRSPSANISWRQYLELDLVLVLLSVLLIAVAVIVIVLRLVYRALRFYRVGDVKIKRN

SEQ ID NO: 7368 - protein, 530 aa, Homo sapiens [sequence omitted]

SEQ ID NO: 7369 - protein, 541 aa, Aotus nancymaae
MSVASAEMTTGLQFLLLQLATGLLLLLSVQRWAESGKVLVLPTDGSHWLSMREVVWKLHSRGHQAVVLTPEVNMHIKEEDFFTLTTYAIPYTQDEFNHLLLSHTQLFFETEHFLKKFSRSIEILKNMSLFAHGACVELLHNETLIRHLNATSFDVVLTDPVYLCGAVLAKYLSIPAVFFLRYIPCDLDFKGTQCPNPYSYVPKLLTTNSDHMTFLQRVKNMLYPLTLSYICHAFSAPYASLASELSQREVSVVDILSHASVWLFRGDFVMDYPRPIMPNTVFIGGINCANRKPLSQEFEGYVNASGEHGIVVFSLGSMVSEIPEKKAMEIADALGKIPQTVLWRYTGTQPSNLANNTILVKWLPQNDLLGHPKTRAFITHSGSHGIYEGICNGVPMVMMPLFGDQMDNAKRMETKGAGVTLNVLEMTSEDLENALKAVINDKSYKENIMRLSSLHKDRPVEPLDLAVFWVEFVMRHKGAPHLRPAAHDLTWYQYHSLDVIGFLLAIVLTVAFIAFKCCAYGYRKCFGKKGRVKKAHKSKTH

SEQ ID NO: 7370 - protein, 532 aa, Mesocricetus auratus
MATEFHMPLQGLVGLLLLCALPWTEGGKVLVIPVEGSHWLSMRDVVRELHAHGHQTVVLAPEVSVHIKKEDFFTLKPYAVPYTKQGYERKITQNINLAFETGNYVKTFLKLTEAIKNISTDVFKSCLDLLHNETLIQHLNSSSFDVVLTDPVLPCGAVLAKYLRIPTVFFLLYLPCDKDSEATQCPSPSSYIPSLLTRLSDHMDFLQRVKNMLYPLALKYVCHVSFTQFESLASELLQREVSLVEVLNHASVWLFRRDFVFDYPRPIMPNMVFIGGINCANRKPLSWEFEAYVNASGEHGIVIFSLGSMVSEIPEKKAMEIAEALGRIPQTVLWRYTGPKPSNLAKNTILVKWLPQNDLLGHPKTRAFITHSGSHGIYEGICNGVPMVMMPLFGDQMDNAKRMETRGAGVSLNVLEMTVDDLENALKKVINDKSYKENIMRLSRLHKDRPIEPLDLAVFWVEYVMRHKGAPHLRPAAHDLTWYQYHSLDVIGFLLAIVLTVVFIVFKCCAYGFRKCFGKKGRVKKSHKSKTH

SEQ ID NO: 7371 - protein, 532 aa, Gallus gallus
MDSFSPCNMLMAVLLPFLCYLNTAAAGKLLVIPMDGSHWLSMKEVLAELSSRGHEIVVVAPDSSILIDSSGNYTMKTYPVPYKQEEMEELLHTIGTTSFSEFPLLTRLLDTWEHFRKTSAMFQAACSSLLYKEELMKFMEESKFDAVFTDPLTPCGQIVALHLSIPTIFFLRGVPCSIDIYAAQSPSPPSYVPRLFSYSTDHMTFPQRVKNLLISISEYFTCSTIFSPFERLASDFLQQPMTLTQLLSHGSIWLKRTDFAFDYPMPVMPNMVFIGGINCGRKKLLAQEFEAIVNASGEHGIVVFSLGSMVSEIPMKKAMEIADALGSVPQTVLWRYTGEVPPNLPKNVKLVKWLPQNDLLAHPKTRAFITHGGSHGVYEGICNAVPMVLMPLFGDQMDNAKRVESRGAGLTLNILEMTSKDISDALKAVINDKKYKENIQRLSDLHLDRPIHPLDLAVHWVEFVMRHKGAPHLRPAAHDLNWIQYHSLDVFAFLLAVVLLSLFISVKCCMFCCRRCCFKKGRKSKSGKSKTH

SEQ ID NO: 7372 - protein, 533 aa, Sorex araneus
MAAESQLLRAVALGLLLCVLGPGATQGGKLLLVPMDGSHWLATLGVIQRLQQKGHEIVVVAPAASVHIREGPSYTLKKYSVPKGREEMQRIMAKLGRRVFEDKPFLQRVVEAYQSVKEDSALFLSFCSSLLYNKELMASLAASNFDLMLADPFLPCGPIVAQHLGLPSVFYLNAMPCSLDYQGAQCPKPPSYVPRSLSMNSDRMTFLQRVKNVLIASTESFLCSAVYSPYAQLASEFLQKTVTVQDLMSNASVWILRSDFVNYHPRPIMPNMVFVGGINCANKKPLAQEFEAYVNASGEHGIVVFSLGSMVSDIPEKKAMEIAKALGTIPQTVLWRYTGTPPSNLAKNTKLVKWLPQNDLLGHPKTRAFITHSGSHGIYEGICNGVPMVMLPLFGDQMDNAKRMESRGAGVSLNVLEMTSEDLSQALKAVIYDKSYKENIMRLSSLHKDRPIEPLDLAVFWVEFVMRHKGAPHLRPAAHDLTWYQYHSLDVIAFLLSIVLGVLFVVYKCCAFGCRKCFGKKPRGKKSHKSKAH

SEQ ID NO: 7373 - protein, 414 aa, Aethina tumida
MKRVPIFCALLSLAQCANILFVTSFPSHSHQVMFQPVWKELSLRGHNVVAITPNPLRDESLTNLTEVDISKVYEKIQEARAPIPALDTVGNPSHPVYAPDHNLPVGRDMTFRERLLSALWAFYVRITYHTIILPREDALARKYMGEDLPYLGDIERNVSLLLLNRNPVFHKTMPVVPAIVELGYMKKNKSESSLNVEIKKFLDQSKNGVVYFSLGSNIMPSILPQEVIKEIVETFRIIPYDVIFKWDQDTLENKPKNVLLTKWVPQEAVLRHKNTKLFVTQGGLQSSDEAIINQVPIIGIPFFSDQTSNVDTMVKYGMGKVLDYSDLTVEKFSAYIKEVITDPSYKENAKKLSQLYTDQPTDALEKAVWWIEYVIRHKGASHLRSSAMDIPWYQYLMLDIFAFISIILIVIIII

SEQ ID NO: 7374 - protein, 518 aa, Monomorium pharaonis
MRVLSVIFPWLFCLSVCDGYRLLALFPFQGKSHFVMFEQLIKGLARKGHQIDVVSQFPLKKPYPNYTDIVTLPTPLILVNNMTYDLMLEYTRVNPAHIVATIGGNDICNFLRYPAIKELSRPKNPPYDAVLMEVFGAHCFGIIAYLLKVPLIGVSSSSLYPWIPPAIAQPENLAFVPNNLLSVTGSMNFWQRLYNTVHTVYDKWYFDYLTRQDQDKLIRENFGSDMPGVRELERKLSLVLINSQIALNGIQPKTPAAVDVGGLHIQDEDQTIQPELEKWLNDSKNGFIYFSFGSMVIIETFPREFLRILYASLGKIAPVRVLMKIPTPENLPPGLPENIHMSPWMPQIKILKHPNIKAFITHGGLMGAQEAITYGVPMIGIPLFADQFINIDTYVARNIALRLDLETITEKSMDAALNAILWDPLYRETARNLSRQFLDRPLNALDTANYWIEYVIKYGENSLRSPAMDLTWWQLYLIDVIGFLVFCVVFVIVVIVFIVRFMLKIIKNNNSSYSKKIN

SEQ ID NO: 7375 - protein, 502 aa, Tribolium castaneum
MYSLTVAFLFASVSSSRILVIIPTPFYSHQSVFQPLWLELAQKGHQVTAVTANPLKTHLPNLKQIDLSFTYKLVYEDHKMQHVINTESNLLTLMRHVFVVMNNITTEQLNHPQVQELIKSDQEFDLMIVEVHIPAWFGFARKFKCPVIGVTSMDATNHVKRMVGNLNHPVYTHHVNLPFGDGLNFWQRVVCVLFELLDEFQTSYLLYPIQEKIIKNALNDPEINLSEIVKNLTLVFTNIIPGFNKVTTNLPSVVQLNGLQIKPPQVLPLELGQFLDGAAQGVIYFSLGSNVKSYLISEDLQQLLLQVFRDLPFRIVWKFEDEVANLPQNVKVVTWAPQQDILRHKNTKLFVTQGGIQSIEEAIRFKVPLLGFPFFGDQFYNVMRVKKLGIGTWLDFKTLDKEGLKTSILECINNQTYLANLEEIADLLDDPLTSLNRAVWWIEFVLRHRGAQHLRSPLADVPFYQYYLFDVVFFLVFIVFLTSFVLLKLMRRKVGYKKLKVQ

SEQ ID NO: 7376 - protein, 519 aa, Heliothis virescens
MATINYVTLCLTLQLIFYTDAARILAIYPVPSISHQVTFRPITLELVKRGHEVVVITADPMFKKGEAPQNLTEIDVHDLSYNVWQAFMNSERGSRDDLVSQMRVGVEVLLELFDKQMQVEEIKELRKGKQTFDLLLTEAVIRNALGFSHIYKVPVIQVSSFGAMFENYNVIGAPVHPLLYPGSMAMRIYNLTLYEKFNELRTKYTMDYIFASVEEKEANLMKKYFGSDVPPMRELQNNVDMLFLNVNPIWEGSRPVPPSVIHLGGLPQKPNKELPKDLKSYLDSSKHGVIYISFGTNVKPSLLPPEKIQMLVRAFSKMPYNVLWKWDKDVLPGKSDNIRISKWLPQSDLLKHPKLKLFVTQGGLQSTDEAITAGVPLVGVPMLGDQWYNVEKYEHHRIGVKLELGTLTEELFANAVNKVIGDDSYRKNIIKLRDLMNDQPMPPLERGIWWIEHVLRHKGAKHLRSPAANISWSEYLELELVFTVLAIVLSALFILVAALYSLYKFVSKNFVISAKLKST

SEQ ID NO: 7377 - protein, 525 aa, Microplitis demolitor
MAFLRVLFVFTIILSISNYQTHALKILGIFPYPGKSHFVMIGALMKELAHRGHQVDVIGHFPLNKPVENYRDLTIQGSRFLLVNNLTYETTVELNSLALNSVVEILGTGVCDLLSHDVFQKLIKNPQSYDILIIEVNFADCYLAFGQHLNTPVVGVLTGKIDEWLIEPFGIPYNPSFTRSSHSGLTKQKTFFERLENFFLYVFTTSKIKYYMEAETEHVQKYFGRKLNSISDLYKDVSLLLINWHHSLDILPSPPGIVEVAGLHVHDSGQEISSDIKLWLDNSHDGFVYFSFGSMVKLETFPHNILDAFYKMFDRIAPVRVLLKVADIDNMPAGIPKNVKLSTWLPQIAILKHKNIKVFITHGGLMGTQEAITYGVPMVGIPIFRDQFINLHAFEQRKIAIVVKLDELTADSLTNAVNIILHDPTYTENVKKMSSLFLDRPMSPMDTAVYWIEYAARHGNVLKSPGSELSWWQNYFFDIYVFCTICILFIIYIIQMLCKLLLKLLNIRKIKNTSSQSKTRGKKNK

SEQ ID NO: 7378 - protein, 514 aa, Bicyclus anynana
MNTLMKILCIVSLSGSIESARILAVYPVPSISHQVVFRPLMHELAKRGHEVVVITTDPAYPKGKSPQNLIEIDVHDLSYKMWNDFLALGKVQHRMDSEQYNLFMDILLYVFEAQTKSEEVQKLINDKEKGFDLLFVEACVRPALAYGHRYKVPMIEFSSFGGVVGTFDDTGASTNYLWYPLPLREKIHNLAFWEKFLNGYSVYKYNKVPVDREETENKVVRSIFGPNTPSLSELKKNVHLIYLNVNPIWDLNRPVPPNIIYLGGIHQNTDKDLPKDIKTYLDSSKNGVIYMSFGTNARPSLLPVETLNIFTKVFSQLPYDIIWKWDTEDLPNRSKNVKISKWLPQSDLLKHPKVKLFITQGGLQSTDEALTAGVPLIVMPILGDQWFNAEQYVKFKIGIYLRLGSITEADFKNAIETIIQDKTYRENVVKLHNIMRDQPQTPLERAVWWTEYVLRHGGATHLRAAGAHMHWTEYYAVDVVVFIFTVALVIVIGVIFAIRYAMSLKGLKVKIKRN

SEQ ID NO: 7379 - protein, 529 aa, Nasonia vitripennis
MLSTQSKMLTILIVLACSSQSIDGLRILGLFPLHGKSHFVMCERLVKHLAQQGHQLDVYSHFPFKKPIPNHKDFSLNGTLPAVVNNMTYDFFKQFQSVDMAAMMSNVGNPVCELLSTPVFQDLFKSLEKNQPYDLVIIEVFVSNCFLAWGRRLNVPMIGVMTSTLIDWYNEPLGNPFNPAATPGCWSGLFHPMNFWERLINTIMYHMISAQFNYHIKAQNKYVEQHFGHGYPDVTELPRDLDLLLVNTHHSLDGVRAFTPAIIPVGGLHIVDDGEKLPEKVLKWLDESKDGCIYFSFGSMVRIETFPKPILAAIYATFKNIAPVRVLMKIAKPEDLPPGLPSNVMTQSWFSQLQVLKHKNIKAFVTHGGLMSTQESLYAGVPMIGVPLFGDQHLNVRVQARQEIAVFVNHEEITEQSFTAAVKEILNNPIYKKNAESFSKKFFDRPMSPIDTATFWIEYVARHGKNALRSPVVDMPWWQVNLIDVYGFILLVLIIIGYIIKVVVKKILKFCCSSKSEDKRSKKAAKKIQ

SEQ ID NO: 7380 - protein, 510 aa, Galleria mellonella
MKSAVWMLLLCMVAAKVSGYHILGVFPVPSRSHNHLAKGIVDSLLKAGHQVTWVTPYPYDNKNKNLKLVPVGTKVIADALDMTNLNNINQGVNVAKEFARNITTMTANTPAVREAVVKTQYDAVVTEWFFSEIDAGYAAVQQAPWILLGGTVYNSFLERLVDEVRSVPTVPFLMNSAPIPMNLWQRLVNTFFHCMITVTDWLEYLSTCERYNAYFSSLAAARGVPLPPLSEATNNVSILLVNSHPSFAPAQPVPPNVINVAGYHIPEDIPPLPKDLQDLLDSSKHGVVYFSMGSVLKSAALPEHIRRGLIQVLGELPYTVLWKFEEEITGLPKNVHVRPWMPQPSILAHPNVKLFITHGGLLSTMESLQYGIPLLAIPMFGDQPGNAERAIRNGYARKIKYGDDVADQLRVELKEMLNNDRYYKRAKYLSRLFRNRPVPPSKLISHYVELAIETKGAHHLRSPSRQYAWYARWMLDQAALLLVALYLVYRLARALLSLCCGKYKQKIKRN

SEQ ID NO: 7381 - protein, 491 aa, Drosophila sechellia
MVGRTKSYFVIILALTSLIYGAQGANILGLFPSLSPSHLIISMSVAKILAEQGHNVTVVTVLEPTITHKNINLVAVPMTKEEIKQRSETIGAKQKNTSSNRLLSILNMSGQMDSMLRKMADVLKDQRVKELYLNKGNHFDLVISGYFMNDYQFGFARKVNAPVVVLATSPPSQMLNSLIGNPHDKVEKEIGMTFGQRLDSYINSLLYGIFMSQIDQRNRQYFKEIFGDDPTMPEYTDILRNTSLVFFCSHAASEGPIRPSNLEEFLGNATHGAILLSLGSNVQGSHIKPDTVKKIFSVLSNLKQRVIWKWEDLDKTPGKSDNILYSRWLPQDDILAHPSVKLFINHAGKGGITEAQYHGKPMISLPVFGDQPGNAHAMVKSGFGLALSLLTLEEEPFRAAVQEILSNPKYSQQVVKFFSLYRDRPASARDLLIFWTEYVIRHHGAAHLQSPLVHMDFIAANNLGRGYFSWYFINIAESTSNHLRKAKNELK

SEQ ID NO: 7382 - protein, 347 aa, Caenorhabditis remanei
MSFSERLINSISIPIMNTFLPKREFKSFRPPYSFIEMASMEPLSTFIFTNSNSYIDYPRPTLEKNVQIGGISVQIEKLRNMKVDEEWDRILNMRSKTVLISFGSFMLSKDMPLEYKKALARAMATFPEVTFIWKYESDDSTTFSKGIENIHFSKWIPQTALLGVLMLKFPNFLFPFPGDSRLSAFFTHGGLGSVNEVSYLGKPTILCPIFADQMRNAKMLARHNGSIEISKYELADSEKIEEVFRIILFDTSYRLASETLALQLANQPVKPKELLVRHAEFAAQFGRLPSLDPYSRQISFIEYFLIDLAFVGLISLLLSSLVLFLITKRTFSFIRFIFSSAVKLKID

SEQ ID NO: 7383 - protein, 421 aa, Dictyocaulus viviparus
MLLMNSFLFLTCVVQWCNGYKMVLFAPDIANSQVLFNTRIAEKLAKAGHDVTVVILSGDFNEKTDEVIIMNEIKEVLENKKFLNWLPMQKFDLAFSHMIDVCPIGLIHYAKIPSWIWLNSGALMDFVAYYMGVPTIPSYVPPMMMESSDQMNFVERIKSFIGHPLTLLIWKSKLQELQRIVDDALGLVVFSFGSVAPSHMMPSTWKNAFLDAFKRFPNYRFVMAYEGTDLQDRLPSNVHVFKWIPQTDLLAQTKTKAFITHGGYNSIQEAIIAGVPMITIPLFGDQPKNAKMAEKYRIAVNLRKSEVSSENIVNALGNLLNDESYSKNIRRLSTMMKKKPVNAEHLLVAWAEFVAEFRTLDNLVPAGNDLNFFVYHSLDVIAFLITSSTLVFIVLWKFIMFIFRRLCLLCRPKNPKKSKRS

SEQ ID NO: 7384 - protein, 517 aa, Trichinella pseudospiralis
MQITITLYVSICLTYGFISELFAKEFRSNVLHFAFGISKSHVLFNERLANVLSENGYNVHIVFAPVAPGVDLPDFRNNKNVEVIKINFTTTDIFLTLGKQWQKNIFKKDSVRNIFAVGRMFQKLLIDSCKILSKSSALKQQIETIQYDVLLTYCLDICPLAFGWKGKIPKTICISPSTVIFESVASIVGTPIRPSFIPNGGSAYSDKMTFFDRLCNSLLSFLMLMYPQLPISAHKIEENIFKTVHGNDYKSIKELNSNIAGMLINGEASLEFPRPLLPTVIYLGDLLPPKSSQLSTEWQHVVEAENAGIILFSFGSVINANFIPWEIKKELLDAFSRFPNYTIVCKLSVDESHKYHLPPNVKLFNWIPQRELLDHPKLKLFITHGGYNSLLETAKVGVPMITIPLFGDQMSNALRAERKKLSLVINKLEITSENLEKKMKILLEDKTYFDRAKQFAGFIHDKPLSNADMLIRYMDITIRRQKIIKSAVLNLNTIQEFNLDSVILATSAFLVLLSLVR

SEQ ID NO: 7385 - protein, 534 aa, Cavia porcellus
MATALQVPLRGLVRLLLLLVCVMPWTEAGKVLVVPLEGSHWLSMKDVVRQLHARGHQAVVLAPEVSFYLKGEDFFTLKTYTFPYTQEEYNHLFSSQNDFIFETKNALQRMSGIFTALRKFLAGYEQSCVKMLRDNSLMNHLNSSSFDVVLTDPVFPCGAVLAKYLRIPTVFFLRAMPCGLDFEAAQCPSPSSYIPHFFTTYSDHMSFPQRVKNMLHILGWKFICHFIFTPYASIASELFQRDLSVVDILSHASVWLFRADFVLEYPRPIMPNMVFIGGINCISRKPLSQEFEAYVNASGEHGVVVFSLGSMVSEIPEKKAMAIAEGLGKIPQTVLWRYTGTPPSNLAKNTILVKWLPQNDLLGHPKTRAFITHAGSHGVYEGICNGVPMVMMPLFGDQMDNAKRMETRGAGVTLNVLEMTSDDIADALKKVIYDKSYKDNIMRLSSLHKDRPIEPLDLAVFWVEFVMRHKGAPHLRPAAHDLTWYQYHSLDVIGFLLGIVLLVAFISFKCCAYGFRKCFGKKEQRKKTQKSKTH

SEQ ID NO: 7386 - protein, 516 aa, Spodoptera litura
MKILVIIFLNFAVTCKYICGYEILAIFPHSARSHHIYFTPLVEELATKHHNVTVINYHPVQKQPFLRQISLQDRQNASACVDIEKRMQVLSVSDFSLAYATAQVFKNIANTNCQKLMNNREVQDLIRSRAHFDLVIVEQFVTDCGLAVAYKLNAPAIGIAAHILSPWTYSRLGAPNNPAYVPNHFFGSGTKPDLFNRIKSVLINFGMNMYYTHVIQRSDQEIVNAVYPDTPLLEDLGKNMSLIMINQYFTLTSPRLYSSNVVEVGGMHINPNYPIEDKSLINFLDSASNGVVYISFGSVASNFPRRITNEIRKFVEKSNMRFIWKSDITDWVPPSNVFVGKWMPQAAVLCHPKVVGFISHSGMLSTSEAMHCGVPIISVPLFGEQFANGKSAVESGLGVSLDILTLNAQVLEDALQTILKEQYQKKAKELSQLWKDRPLSPMETAVFWIEYVARNKGAVNLKPPTVDMPLYQYLMIDVAFIIASSVVITFYISVKVLSLVLIAVFGKHKLKRKKVD

SEQ ID NO: 7387 - protein, 250 aa, Rattus norvegicus
MCTQEEFEAYVNASGEHGIVVFSLGSMVSEIPEKKAMEIAEALGRIPQTVLWRYTGTRPSNLAKNTILVKWLPQNDLLGHPKARAFITHSGSHGIYEGICNGVPMVMMPLFGDQMDNAKRMETRGAGVTLNVLEMTADDLENALKTVINNKSYKENIMRLSSLHKDRPIEPLDLAVFWVEYVMRHKGAPHLRPAAHDLTWYQYHSLDVIGFLLAIVLTVVFIVYKSCAYGCRKCFGGKGRVKKSHKSKTH

SEQ ID NO: 7388 - protein, 533 aa, Equus asinus
MAVGLRVPLLALAGLLLFLCVGPWAEGGKVLVVPMEGSHWLSMREVVRELHARGHQVVVLSPEVTLHVKKEDFFTMKTYSVSYTQDEFDHLLLGQSHTAFERAHFLKRLWTSMTNLQKASLIFQKFCEELVYNKDLISHLNASSFDVVLTDPVYPCGAVLAAYLKLPAVFFLRHIPCDLDFESAQCPNPSSYVPKLLTMNSDHMTFLQRVKNMLYPLSLKYICHVTLVSYASLASKLLQREMSLVDVLGSASVWLFRGDFVLDYPRPIMPNMVFIGGINCAHRKPLSQEFEAYVNASGEHGIVVFSLGSMVSEIPEKKAMEIADALGKIPQTVLWRYTGTPPPNLSKNTILVKWLPQNDLLGHPKTRAFITHSGSHGVYEGICNGVPMVMMPLFGDQMDNAKRMETRGAGVSLNILEMTSDDLANALKTVINDKSYKENIMRLSSLHKDRPVEPLDLAVFWVEFVMRHKGAPHLRPAAHDLTWYQYHSLDVIGFLLAVVLGVAFIIYKSCAFGFRKFFGKKGRVKKSHKSKTQ

SEQ ID NO: 7389 - protein, 532 aa, Caenorhabditis nigoni
MHCLLTFVFFLFGTVHAKNILIINPIFGYSHAKFISKMADVIADHGHNVTLFQPFHADLKNLDGLVKNKNIEIINYYPDHFEELKNADIQTFPVFWDSHLVNNPVLSSFMMPRMLANEFEKTDKQLYLDTNLHADLKSRKFDVAIAETFGAASFFFAHLLELPCIPMFSAVRFEVINELFGQPLALGYITRDGSKGAPDAGFLDRLNDVYRKYFEVSGFERIFQYQNELFQKTMGRPVPSWKDLISQSPVFITNSNPYLDFAVPTTATVVHVGGITMDLNKMKNVGPLPEEYEKILQERDSTVLISFGSVIRSFQMPDNFKAGLIKMFESLPDVTFIWKYEKDDAEFQKRLPKNVHLKKWVPQPALLADKRLKVFVTHGGLGSTMEIAYTGKPALMVPIFGDQPQNALMLARHGGAVSYDKFDLPDGGKLTRTIKEMIVNPKYQEKAQELLEVLFNQPIDPKLNLMKHLEFAIQFPNLRSQVPEINQVGLIAHYYLDVVLFLALSSTLAFYLLFKILIRISVKLFVKKTKTD

SEQ ID NO: 7390 - protein, 528 aa, Ursus maritimus
MACLLHVFPKAFFLVLWGEVVGDKLLVVPQDGSHWLSMKDIVELLSEKGHDIVVLVPEVNLLLKESKHYARKIYPVPYDQEELQARYRSFGNNHFAERWLLNAAQTEYRNNMIVIDMYFTNCQSLLEDAATLSVLRKSKFDALFTDPALPCGVILAEYLGLPSVYLFRGFPCSLEHTMSRSPNPVSYIPRCYTQFSDRMTFPQRVANYLVNYLETYLFYCLYSKYEDLASNILKRDVHLPTLYRKGSIWLLRYDFVFEYPRPVMPNMVFIGGTNCKKKGVLSQEFEAYVNASGEHGIVVFSLGSMVSEIPEKKAMEIADALGKIPQTVLWRYTGTPPPNLAKNTRLVKWLPQNDLLGHPKTRAFITHSGSHGIYEGICNGVPMVMLPLFGDQMDNAKRMETRGAGVTLNVLEMTSEDLANALKTVINDKSYKENIMRLSSLHKDRPIEPLDLAVFWVEFVMRHKGAPHLRPAAHDLTWYQYHSLDVIGFLLAVVLGAVFIAYKCCVLGCRKCFGKKGRVKKSHKSKAQ

SEQ ID NO: 7391 - protein, 512 aa, Helicoverpa armigera
MLLASVILLLSITGNDAARILAMFPVPSISHQVVFRPLTQELAKRGHEVTVITPDPAFPKGEGPPTLKEIDVHFTYEVWSKMFAVTSTGEQDMIKQMEVAFNLIANIVEIQLKVDEVQRILKEEKFDLLLVEACARPTLVLSHVFKVPVIQVSSYGPLNFNIDTMGMAWHPLLYPLNLNQRLYNLTMMEKLKEVWNVYRLHNLMNEVEVAENDMAKRLFGPNIATIQELKNNVHMLLMNIHPLWEDNRPVPPSVIYMGGVHQKPEKELPADLKTYLDSSKNGVIYVSFGTNVKPSMLPPEKVRILVKVFSELPYDVLWKWDKDELPGRSSNIKIFKWLPQSDLLRHPKVKVFITQGGLQSTDEAITAGVPLIGFPMLGDQWFNVEKYEYHKIGLRLNMNTLTEEQFKSSVEKVVGDISYRKNTERLRSLMHDQPMKSLDNAVWWTEHVLRHGGARHLRSPAANMSWAEYLELELVFTVLSIALSILLLASFILYKLCKYVVGRPLDKKIKAN

SEQ ID NO: 7392 - protein, 530 aa, Microcebus murinus
MAVARESMAGRWMLLLLGSLLPGILLSEVAKILTVSTMGGSHYLLMDRVSEILQDHGHNVTMLHQRGDSFISDFKEEEKSYQVMRWFLPEDHQKELNKRFNFFIEEAFNGRGIYENFLKFIEQFGFQCSHLLSRRDIMDSLKNENFNLVIVDGFDYCHFLIAEKLGKPFVSVLTTSFANVDFGLPSPLSYVPVYNSLLTDHMDFWGRVKNFLTFFTFSRRQWQVQSMYDNTIREHFPEGSRPVLSQLLLKAELWFVNSDFAFDFARPLLPNTIYVGGLIAKPTKPVPQDLENFIARFGNSGFVLVAMGSMVKITSFREILKEMNSAFAHLHQGVIWKCKHSHWPKDANVSTNVKLMDWLPQRDLLAHPSIRLLVTHGGQNSIMEAIQHGVPMVGIPVFGDQPENMVRVEAKKFGVSINLKELKAETLALKMEQVIEDERYKSAAVAASVIRRSHPLTPAQRLVGWIDHILQTGGSAHLKPYAFQQPWHEQYLLDVFAFLLGLSLGAVWLCGKLLGVVSRWLRGARKLKET

SEQ ID NO: 7393 - protein, 514 aa, Ooceraea biroi
MRVQSVIFVSLLWLSDCSAYRFLGVFPFPGRSHFVVPESLMKSLADKGHQVDVISHFPQKKPYPNYTDIAKLATTVIYDNNVTYEFIMQMPNRNMVNTLATFGGNYVCEASLGNPVIQKLVREPPKNPSYDAMIMEIFNAHCFAAIADLLHIPLIGVSTTSMYPWHSELIGQPENLAFVSNVIVRQEFPKTVWQRTYNTLHTLYCKLYFNYLTRPQDELVRKHFGPNLPSIQKMNLALILINTHIALHGIQPMTPAAVQIGGIQIREDDSPLPQELKNWMDDSKDGFVYFTFGSMVLIETFPRTILDVFYVSLGKIAPVRVLIKVPNPEKLPAGLPENIRTFRWMPQVKVLKHPNIRAFVTHGGLMSTMEAIFCGVPMIGMPLYADQFKNVEACVTRNVSVKLDVHKMTEKDMDAALNAILHDPRYMENIRNLSQRVHDQPLRPADIANYWIEYVIKYGDDVLRSPAMDLAWWQICLIDVAACFLFCVTAIITVAMFIICFVMKMINGNHHMFL

SEQ ID NO: 7394 - protein, 524 aa, Bactrocera oleae
MHPRWLLLCLAALLMPITSTAFNILFMGPFPAPSHWLWLEHFLRDLLHRGHHVTALTNHRAKYRHENLTEIIIDPQFDIPHYFPKENIFKMRYASDFQNIQMWFHVGLLTSEYALNDPKVKALIASKDQQFDLIVLEQFFHESFLMFAHKFKCPVVTLGTMGYADNMDHTMGLLTPWAFIPHLLLSHTDQMTFTQRAYNTYLSLYDAVMRRWYYMPKMQEMAERHFTGLVEGPLPHVRQLEKNISLMLINSHRSLDVPRPSMPGLVNVGGVHIKTPKPLPQDLQNYLDNATHGVVYFSLGSYMKSIDMPKEKISLILNAFGQLKQNVLWKFENSSIGHLPPNVKIQSWLPQNDILAHPNIKVFITHGGIFGTQEGIHWGVPMLSIPLYGDQHRNTIKSVRGGYARTLNFGQMTSEDLVQNIRLLISDASYKQKALEASRKFRDNPMHPLDEASFWIEYIARHKGATHLKSYGAYMPLYQYLLLDVFGCALLIAFIVIWLPLKILKFLGSLLRRKEPEALRKKHQ

SEQ ID NO: 7395 - protein, 533 aa, Otolemur garnettii
MVPVLQDLGMRLLGLLLLLSVGPWAEAGKVLVVPMDGSHWLSMREAVRELHARGHQAVVLTPEVNMHIKGEDFFTLKTYTVPHTQEEFDQNFANYIQIVFERQHFLKIFFKSMAVMKDSAVILYRGCRELMYNKTLIGHLNATSFDVVLTDPVYPCGAVLAKYLSIPTVFFLRYIPCDLDFEGTQCPNPSSYIPRLLTRHSDHMTFLQRVRNMLYPLALKYICHVTLSPYASLASEFFQRQVSLVDILSHGSVWLFRVDFVMDYPRPIMPNMVFIGGINCASRKLLSQEFEAYVNASGEHGIVVFSLGSMVSEIPEKKAMEIADALGKIPQTVLWRYTGTRPSNLAKNTILVKWLPQNDLLGHPKTRAFITHAGSHGIYEGICNAVPMVMMPLFGDQMDNAKRMETKGAGVTMNVLDMTSADLENALKAVINDKSYKENIMRLSSLHKDRPMEPLDLAVFWVEFVMRHKGAPHLRPAAHDLTWYQYHSLDVIGFLLATVLTVAFIAFKCCAYGCRKCFGKKGRVKKAHKSKVH

SEQ ID NO: 7396 - protein, 469 aa, Aethina tumida
MHTYQLEMFWYVMCVLQVCESANILGVIPTPSYSHHVSFQPVWRELSLRGHNVTIITANPMNDHELTNLTEIDISNIYECVERYKVWELMSGKNILSDFVEVIFTNPRVQTLIKDPNVKFDLVFYEASAPVCLALAHKYKCPAIGVQSMDTLPTIHTSMGNPTHPLVTPDYILKIEDVENMTFLDRLSAWFCDFFNKILFKIVILPLMNDMNRKYFGDDVPDVNSLMHLTDMIFVTTDPIFHNMRAVNPNTLTIGGGFHIKPPKPLPKVLKQYLDGAKEGVIYFSLGSNVKGNFLNEQSKKAIIGVFSQLPYKVLMKIELENYNVPQNVKIGKWFPQQDILRHPNIKLFITHGGLQSVQEAVTNGVPMVGIPFFGDQYNNIFKGVKKGFAVIVDKENITVESFKEALLEVLTNPKYKETTMKMKEIMYDEPMTSLEKVVWWTEYVFKTQRSKTFQKSYSTYTILSVLFY

SEQ ID NO: 7397 - protein, 512 aa, Helicoverpa armigera
MMSFCLFILVLSVTCNDAARILAVFPVPSISHQVVFRPLTQELAKRGHEVTVITPDPVFTNGEAPANLTEIDVHFTYEDWKKFYETTSGDNNDLLEQLHTAYILIDRIFEIQMKVDKVQEILKEQKFDLLLLEACAKPALALSHIFKVPVIQVSSLGPIFFNSDIVGSAWHPLLYPINFSLKLNNLTKWDKLMELWTLYRIVTMMQQVEKVEDETAKRLFGSDVPPMSELKNNVDMLFVNIHPLWDTNRPVPPSVIYMGGLHQKPQKELPQDLKSYLDSSKNGVVYISFGTNVKPSQLPAEKIQILVKVFSELPYDVLWKWDEDELPGRTSNIRISKWLPQSDLLRHPNIKVFITQGGLQSTDEAITAGVPLIGVPMLGDQWYNVEKYITHEIGVRLNIETLTEEEFKNAITEVIGDKKYRENIKKFGEVVRDEPMPPLERAVWWTEHVLRHGGARHLRSPAANMSWTQFLELELVLTVISVPLGFVLLLSFLLYYSYKHLAISPKQKLKDN

SEQ ID NO: 7398 - protein, 536 aa, Heterocephalus glaber
MTGPLPAFQRVSAGLFFLALWGMVVGDKLLVVPLDGSHWLSMKDILEHLSGRGHDIVVLVPEINLLLKESKHYTRKIYPVSYSQEELEDRFRSFGNLQFAERAYVTAALMEYKNSMVVIDLWFFNCQSLLKDSNTLNFLKDSKFDALFTDPGLPCGVILAEYLQLPSVYLFRGFPCSLEHVLDFAGSQCPNPSSYIPQLLTTYSDHMSFLQRVKNMLYPLALNLFCSTVFGPYPRIASELFQREVSLVDVLSHASLWLFRGDFVLDYPRPIMPNMVFIGGINCVSRKPLSQEFEGYVNASGEHGIVVFSLGSMISDIPEKKAMAIAEGLGKVPQTVLWRYTGTPPSNLAKNTILVKWLPQNDLLGHPKTRAFITHSGSHGIYEGICNGVPMVMMPLFGDQMDNAKRMETRGAGVTLNVLEMTSDDLANALKKVIYDKSYKENILRLSTLHKDRPIEPLDLAVFWVEFVMRHKGAPHLRPAAHDLTWYQYHSLDVIGFLLAITLSVSFITLKCCAYGFRKCFGKKEHVKKTPKSKTH

SEQ ID NO: 7399 - protein, 474 aa, Caenorhabditis brenneri
MDQGRSHATSINTFMHRLQKDNHTTALEFAMFHPDIDFGMEEQFIDMGGFQNPFASPDFDKIAFDEEYSFIHQAVAYGFGSETCNNILSHRRDRFFEILNEGWDLYMSDSLFAVCGYGMAEISGKPHVMMHSTDLEAAQGSLKAFSRNYATFVPSNLPFTMLDFTVSKFQHRVWATYDWFGSFIFTAFVGNFAQKWALRSIIPFPYFSFSEYNRRSSFSFTDMPDSLFPPASRTNDFFSFGAYCKSSHKSLDAEFKTFIEDPKSKGTILIAFGTFVDWRKAPDHYYEAFSTVVNQLTGYRVIWSMKGDRPSGLGKHVKTAAWVPQNQILHHNKTVLFLSHGGLKSTKEAICSATPTIFVPMFGEQTRNAWLIQEKGFGRIMNKFKIDEDVLGTHVNEVLLHPDYQNNANKFLTHYMDQPIPTLDEGAFKFNRLIKYGGKMPSYFYPKALNLSYFTSLNMDLILLPVFFSFLISK

SEQ ID NO: 7400 - protein, 813 aa, Apaloderma vittatum
MAVVLRAHPQLVAMLVLLLSVLSSAAGGKLLVVPVDGSRWLSMREVLDVLSQKGHEIVVVAPEINKHIKPSKNFVMKTYPIPFTKEEVDGSFHSFSQEVFEEGYFLERFLKVYQRLKRISDMTLSTCAHLLSNKQIVRYLQKSKFDAVFTDPVLPCGQILAEHLSVPSIFFFRVMPCGLDFEATQCPNPPSYVPRVFTGLTDHMSFLQRVKNLILDIPNYFLCDSVFQPYAKLASEFLQRDVTVLDLWRKASIWLLRLDFVLDYPRPLMPNMIVIGGVNCAYNKLPQRYQIYTALVLFLSFWSWAEGGKLLVVPQDGSHWLSMRVVLEKLWERGHEIVAVIPDASLLMKSSQSFTIKTYSVPYTQEFLERFYHSIGEKIFDNPSFLEKITIIISNMSEVTTMFSSSCRNLLYDEELMKYIQDSKFDAVMMDPVLPCGPIIAEYLSLPSVYFMRGLPCTLDYEAAQCPSPFSYVPRIFMSSSDHMTFTERVKNHLVGISGNWLCYLFYLKYENLASEFLHKEVTILELFSKASIWLMRYDFVFEYPRPIMPNMVYVGGINCEQKEPLPKEFEAIVNASGEHGIVVFSLGSMVSEIPMKKATEIAEALGTVPQTVLWRYTGQTPPNLPKNVKLVKWLPQNDLLAHPKTRAFITHGGSHGVYEGICNAVPMVLMPLFGDQMDNAKRVESRGAGLTLNILEMTSKDISTALKAVINDKKYKENIKRLSDLHLDRPIHPLDLAVYWVEFVMRHKGAPHLRPAAHDLNWFQYHSLDVIAFLLAVVLLSLFISVKCCMCCCRRCCCKKGRTRKPTKSKSH

SEQ ID NO: 7401 - protein, 525 aa, Drosophila ananassae
MLLLCISLVLFSIGWESAGAAQILGLFAHPGKSHFNFFRPIFTALAERGHNISMYSYFPLEKPIDNYTDYVFQGMPVLTDIVDLQNFESDWKPLGLPFKIPTYFMLHDWGLRSCKVALNSPLIAQLLASPIRFDVVILEHFSNDCMAAVAHLLGAPMIALSSCAIMPWHYKRMGSPFINPIMPMNFLPYTDEMSLIHRINNFFHFHSVSILYNWITQPATDELIKHRFGNGLPPINEIVKNTSLMLINQYYALTGPRPYAPNVVEVGGLQLRVEKPLPQNLMDLLDRSRDGIIYISWGSMVNPNTLSPAKRSALFESISQFKKYNFVMRWKCDPLLLKEKPSNLYIYDWLPQRDLLCHPKVKGFMSHGGLLGTTEAVYCGVSMLVTPFYGDQFLNAGAIEQRKLGIIVDFVNFDTEHITRGLQEILDKQFAENVKRASRAFRLRPIPPLELAVWWIEYVIESGGAPLIQNESRNMHWIVYNSIEVYLICLGVLCLVSIGLWKSVKLLSRALCRVKNEEKFKPKQQ

SEQ ID NO: 7402 - protein, 518 aa, Apis florea
MKFLFAIIVIACAVHDDASGARILMVTPHQAKSHYIVYEALLKRLAERGHQVVSFNHFPQKTVLPNFTDVDISSSMPCVVGTRSIELAFWQTMLQKLKTISFISSETCRSVLEHPEVKKLLHSKEKFDIYIMEIFFSDCFIGISHVLKIPIVVGISSTVSYPWNNEILRNPEIPSYIPNTILSSFSDEMNFFERATNLMYFFISKLAYRYLMDKPGYEIAKKHFGDDLPNLDTLRSRISLILTNGHRTTNTPRALAPGLKELGGMHIPASGPPPLPKHLKDFLDSSEDGVIYFSLGSQINVSTMPNEMLTSFYEAFERVPQRILWKCSERNMPRLPKKVKCIEWAPQLSILCHPNVRLFISHGGMLGSQEAVYCGVPILGIPLYGDQPLNVAYFVKRGLALKLDYHQLSYESTISNALNELLVNNSYTDMARKASFEFRDRPIPPLDEGVYWIEYLLRHGPDSLRTAATNLTWYQYLLLDVILAIIISIVFTVFIVCKLFKLLFWRGKMSIDVNKKRS

SEQ ID NO: 7403 - protein, 452 aa, Papilio xuthus
MLRFSLCLILLVGSTLNIEASRILAIYPCPSISHQIVFRPLTLELLKLGHEMTVVTTDPMFSKENAPANLTEINVHDATYDVIRKIISNVVTGSKSDVLNQAIVVKELIYKATEAILLTNEVQHILKNEKRYDLIFIEALFTPMLGISHKFKAPTILISSFGPFIGSYEIVGAPTKALLYHNMYSQRLNNLTLYEKISELYNYIRIQYIFNHSDEKFNELLKRIFGSDTPTLSELKNYVDMLFVNIHQIWEGNYPVPPTVVHMGGLHQKPQKSLPKDLQQYLDASENGVIYFSFGTNVNISHLPQEKIMIFKNVLSELPYNVLWKIKDDYLPEESKNIKTFQWLPQADLLRHPNVKIFITQGGLQSTDEAITAGVPLIGVPILGDQCYRDNVKRLRTLMQDQPQTPLERAVWWTEYVLRNGGAKHLRAPAANLSWTEWQTSEWPPEIAEIAK

SEQ ID NO: 7404 - protein, 537 aa, Trichogramma pretiosum
MKGFKIIITVLLINFSISRAYRILVIFPFHAKSHDNMLSAFAKGLAERKHQVDVVTHYPLKNPPDTYKVVVNLNGTEPPIINSFHIDYAKTIAEDVTTAVSDRYGSDLCHYMNLPEFQKLIKKIKSSKEKLYDLVVMEVFGSSCYIGFGRLLKVPVVGISTLIEFPWISDFIGNDDNLAYVPSCSSTYFDKTKFWDRLMNFLHYHSQKYRFQSKTEKIQTELMRKYLSPDMPNVREIEKDVALTFVNRHPVIFGVKPLVPSLVELSALHIEKDPKLPADLQKWLDESKSGVVYFTFGSMVLIETLPEHQLLGIYDSLRKLNQRVLLKIADPAKLPPNLPENVLTSPWIPQQAVLKHKNVKLFITHGGLMGSQEALYYGVPMIGIPLFGDQPINVDKFVQMKMSVKIEFDNLTSSSLDWALNEMFTNYEVYKERAEYNSRLFKDRPMSPLDTAEYWIKYVIRYGAGPLKSPALELTWWQLSMLDVYVFLLICFIVANLFLCFFLCNSVNLFLAVVNFIKNRISIKHRTSSRNLSKKIK

SEQ ID NO: 7405 - protein, 544 aa, Anopheles sinensis
MAPATGRFRHTRGQTCSVPLLLLLLPLATLLAVADAAKILAIFPVPLKQHQLVYRPLLEELARRGHDIVLMTTDPLDLPPKGTGNGTLADRIEQIDLGFAYGLPALEQLHVDGLDGRDMLRNIFDVMRTISAEELQHPAVQRLIRSASSAEPGNRFDVVIVEWSGVTLMNAFAEHFRAPLVGIANGGAYINAHEALGNPNHPIGYPSIFMPFSEDLSLLQRISSVLFTVWYRFYYYTEEIPAQNAIAKSNFGEQISDLRQIEQNADLLLINAFQLLGNVRPVGPTTVHLGGIHQRRVAEPLPEDLALFLSHSDGPVVYVNLAVTSAGARLDKIVKTLERLDLASVWALNEDSELINSTGRIYQSYSVPQEAVLAHPKVRVFVTDGGQMNVEDAIQHKVPVVGISYSTSYEHYLRQIAKYEAGIISLIDYESQTFADKLRDVCTDDRYQENVSKLHRLLNDQPQTSIERAVWWIEYVTRNAGAKQLRVRHLSWFEYLMLDVLLAVGVFATVIVCAIAYLIYRAVRYSRSLPMEMVTRGSRKCKML

SEQ ID NO: 7406 - protein, 541 aa, Dufourea novaeangliae
MLVSRLGWIFLCCLVIVTCCTGTINDPKPKKKLKILGVFGHLGKSHFDVFKPLLEELARRGHDLTVVSYFPRTEKAIATEPLPNYKDINLKTKDVDVFVNVVDLQRIRDTYFRVFIELYFLNSMASVACEAGLNHPDVKDLVKSGEQFDVVLTESFNTHCFFAVFHRVDAPFIEISTHQLMSWTVDELGISNEASYIPTLFSHVPRPMNFFQRTWNVVAMMIEWTVANTLFKWNAQSVAEKTHGPGMFDLKEKSRNVTLMFVNTHYTLHGAQPFPPNVIEVGGLHIPRKTNPLPQDIAKFLDDAHEGVLYFNLGSVVKMSTVPEDKLTILLNMFASIPRKVIWKWETDDLPHKPSNLLVKKWLPQFDIMNHPNVKCYFGHGGLLGLSEGVHTGIPMILMPLFGDQYQNAMAARARGVAIVLKYSELNERDLRHAVDEIFNNTRYRENARRLSKAYRDRPATPLETAVWWTEYIGRGNGVPYVRTAGANMSWCTRNLVDVYTFLFTVLLTIIYVLYRLAKYLLLVRKKSKDIDQRASTKKRD

SEQ ID NO: 7407 - protein, 524 aa, Ceratosolen solmsi
MFRIMNIISLTAFLVFILINVIYSESYRILAIFPYNGKSHDIMFNALMMGLAEKNHQIDVITHFPPKNPPPNYKVIVNLNGSLENVQNNLSVDFVTTLSSNTTKLIVSKFGNRICQLLGLEAIQTLVKNPPNNPPYDLVITEAFAANCYMGFGYLLNVPVVLVSSTIEYPWINHYIGNMDNLAIVSYSFLTDFDKLKFWDRLKNVFFYHYDLYIFHTMTEKIQTELMRKFLNPNIPNIREVEKSAALILVNRHPVIYNAKPVTSSLIEVSGLHIKKNNTKLFPELQTWLDEGINGVIYFTFGSMVLIETLPINIITDFYKSFSKLTSIRILMKINDKSKLPEGLPKNVLSYPWIPQQAVLAHKNVRVFITHGGLMGCQEALFYGVPMIGIPLFADQLSNILKFVAKNMAIKINYNNLTMISIDEALYSVLNNPIYRDNAKLYSKIFNDRPMNSMDTAIFWIEYIIRNGPNILKSPALKLYWWQLALLDVYGFILFSLVFIVFFIFCIIKILLAQLYSLKKEKIQ

SEQ ID NO: 7408 - protein, 397 aa, Ancylostoma ceylanicum
MNAIVSLEEYLLFNKRVAEALADAGHDVTIALIVPQSDLDNSDIKIKSAHVVNAPINLTRKAMEERMEEYVFRESDSKMFGRFSLQISMILDTCRATVENKELLPWLKREKFDLAFAHMFDVCTVGLVHAAKIPSWIWLNSGSVIDYVANLVGIPLIPSYVPLEFKASHFRLIADPETELFRTHVSPDFPNLMELAAKCPLVMANTNELYEAARPTLAKVVNIGGIDMLPPNVHLFKWLPQSDLLRHPKTKVFITHGGFNSIQEAIHSGVPVISIPLVGDQPKNAALAEHHGFGVTLSKGEISVESVSQALEEIITNTKYRDAVKRLSKMMDHKPVSPTHLLVKWAEFAAEFQTLENLEPAGNKLNFFQYHSLDIRPTPPLAFWMNSNSSTLRSPDL

SEQ ID NO: 7409 - protein, 226 aa, Heterocephalus glaber
GSMISDIPEKKAMAIAEGLGKVPQTVLWRYTGTPPSNLAKNTILVKWLPQNDLLGHPKTRAFITHSGSHGIYEGICNGVPMVMMPLFGDQMDNAKRMETRGAGVTLNVLEMTSDDLANALKKVIYDKSYKENILRLSTLHKDRPIEPLDLAVFWVEFVMRHKGAPHLRPAAHDLTWYQYHSLDVIGFLLAITLSVSFITLKCCAYGFRKCFGKKEHVKKTPKSKTH

SEQ ID NO: 7410 - protein, 518 aa, Neodiprion lecontei
MGLLGILFALLMTGSFTDGANILAIFPYQGKSHNIMFEPLMIGLAKAGHSVDVVSHFPLENPVTGFNHTSLKGTLRSYVNEVPVEITLKNKGIFRVIHFASAEEPKSLCGLMKLPQLQDIINTDKKYDLMITEIMGTNCYLAVAHKLKLPIVGLVTNVMYSWAYPPVFGDTHPSFIPSQLTEFTNEMNFVERVQNLIIHLYSQYLFSYYDRTLSDPLARKYVEGVPPLNDIYNNISLVICNSHFSIHGARPGNPAVVEAAGIHIDESQILSEELDSFLNSSKDGVVYFSMGTMVRSDTFSPEKIHAIYETFSELSNYKVLWKGNLDSLPEPLPYNVKVVSWAPQYAVLRHPKVKAFVTHGGLMGTQEAIHAGVPMIGIPFFSDQKFNVKGYAHRGFAIYLDYLKISKESFSKALAEVLTNPKYQSNAARFSRLFKDRPLSPLDEAIFWIEYVIRNGGESLKSSGRHLYWFQYYLIDVILFLLAVTSLIIAVLFIFVRRTLRIITGTQTFSDPMKQKTS

SEQ ID NO: 7411 - protein, 520 aa, Leptinotarsa decemlineata
MNPGPVLLLVCLLSSVASSAKILASIFSPSYSHQIVFRPLWRELADRGHHITLLTTDPMRDVSRKNIKEIDLSGSYEVMESFGNSDILSKKRSEGTPKVILEMEILDVLAKVADWQLGVPEVRNLIRNRSEYFDVLIVEALNPIHMAFAERFNVPFIGVSPQEAPIRIYTVLGNYVHPVIFPEPYLPFSPPLNLKQRLASVAFNTITWYYQYHWRYPQETAIARKHFGNIRELQQIEREMSFLFINVNPTLQQTRPVGMNTIYLGGGMHIGEVKPLPEELQDYLDSSGNQGVIYFSLGSNVKSSRLTGNLLDVIVSTFAALPYKILWKFESSLQDLPENVKIINWAPQRDLLADSRIKLFITQCGLQSLEEGIFNEVPMVGMPFMWDQPGNAKTLEKKGLGLTVDIMNLTKDSFTKTIMEVISNPIYKKNVVGLSKLMKDVEKTGLERAVWWTEYCIRTKGAQHFRSGVGEVPSYQMYLLDVILIVVIACIITTLILVMSVVLCYRICFRRSRSLKLKKS

SEQ ID NO: 7412 - protein, 519 aa, Amyelois transitella
MFRLIVIISCVFVIEAARILFVIPTPSISHQLPIRPLSQELAKRGHNVVVITTDPIFTKEEAQNNFTEIDLHDLSYTLWKEKFINAKHSGSVNDLESQISVIYNLTTYIFEMQMEAENVKTLINDRKQKFDLIFLEACARPAILFSHIYKVPVILISSFGPIYNNLEVVGAYDHSILFPEMTRQKINNITDYEKLKEMYNEYKLHKIIDNAEVLQYAVIKRVLGVNAPSLSELYDNVDMLFLNAHPIWDSNRPVPPSVVYLGGIHKTPRKDLPKDLKAYLDSSKHGVIYISYGTNVSPSALPAEKIQMLARVFSRLPYDVLWKWDKDDLPGKPKNVRISKWLPQSDLLRHPKLKVFITQGGLQSTDEAIDAGVPLIGMPMLGDQWFNVENYVKHGIGVRLDMDTLTEEKFQNAIEKVINDQSYRQNIIKLRDLINDQPQSPLERAVWWTEHILRHGGGRHLRSPAANISWTQYYEVELIAYLLAGLLLVLVIFATVIIYTVRFVSQIINSNSKLKSKEL

SEQ ID NO: 7413 - protein, 518 aa, Trichoplusia ni
MVAYLYLLTCYLLFVNSNEAARILAMFPTPSISHQVVFRPVTQELAKRGHDVTVITTDPAFPKGKAPANLTEIDIHDLSYDIWMKSFMSSPRTDDLLTQSEILLNLIRILFDTQLKDERVASLVLGKEQKFDLLILEDCVRPALSLTHFHKVPVILFSSLGFVLDNFQTLGVPYHPLLYPGVPRQRLNNLTLWDKISETYIFMRYQYLIGESIALDDKMLKRHFGPEFPTGTELSNNVDMVFLNVNPIFEGIRPVPPNVVFVGGLHTTPRKDLPADLKSYLDSSKNGVIYISFGTNVDPTLLPAEKIQVLVKAFSQLPYDVLWKWNGDELPGRTENIRISKWLPQSDLLKHPNVKLFITQGGLQSTDEAIVSGVPLLGMPLMVDQWFNVERYVSLKIGLRVDLEDVTEEKFKNAIIEVITNDSYRRNIEKLRSIMHDAPQTPLERAVWWTEYVLRHGGAKHLRSPAANISWVEYLELELVLTLLTGLSVILSVVFIVVRKLYKLIFKSSRSSVKSKRS

SEQ ID NO: 7414 - protein, 530 aa, Chinchilla lanigera
MAPAHSPSPLPLCLCLLLASSFAQAGRLLVVPMDGSHWFTMRSVVEKLVQRGHEVVAVMPEASWQLGQSLNFTVKSYPTSFTVEELDHSFQFFADTQWNTLERGMYSFATGSSKRFFGITFSRCRSLFNAQKIVEYLRKTSFDAVFMDPFDVCGLIIAKYFSLPSVVFARVIFCHLVEEGTQCPYAVSYVPRLFSALPDAMTFKERVQNLFTHLEERLFCNYFYQNALEIAAEILQRPVTMYDLFSQPSVWLLRTDFVFDYPRPVMPNMVFIGGINCHERRPLPQEFEAYVNASGEHGIVVFSLGSMVSEIPEKKAMAIAEGLGKIPQTVLWRYTGTPPSNLAKNTILVKWLPQNDLLGHPKTRAFITHAGSHGIYEGICNGVPMVMMPLFGDQMDNAKRMETRGAGVNLNVLEMTADDLEDALKKVIYDKSYKENIMRLSSLHKDRPIEPLDLAVFWVEFVMRHKGAPHLRPAAHDLTWYQYHSLDVIGFLLAIVLFVAFVAFKCCAYGFRKCFGKKGRGKKAHKSKTH

SEQ ID NO: 7415 - protein, 1099 aa, Apis cerana
MEPFAFRMGWLEENVWERFGVSSPRGLPRLKSRAVVVSQDFVDYRHAIFFCAVYDDASGARILMVTPHQAKSHYIVYEALLKRLAERGHQVVSFNHFPQKTVLPNFTDVDISSSMPYVVGTRSIKVASRQTMLKKLESISLLSLPTCQSVLEHPELKKFLHSKEKFDVYMMEIFLSDCFIGIGHALKIPIVVGISSTVSYPWTNDILRNPEIPSYIPNAVLSDFSDEMNFFQRATNLMYLFISKLAYRYLADRPGYEIAKKYFGDDLPDLDTLRSRMSLILTNGHKAVSTPRALAPGYKELGGMHIPASGPPPLPKDLKDFLDSSENGVIYFSLGSQINMSTMPNEVLMSFYEAFERIPQRILWKCTENNMPRLPKKVKCIEWAPQLSILCDPNVRLFISHGGMLGSQEAVYCGVPILGIPLYGDQHLNVAYFVKRGFALKLDYHQLSYESTISNALNELLLNKSYRDMARKASFEFRDRPIPPLDEGVYWIEYLLRHGPDSLRTTAPNLTWLKIDAGGKKIVEEVSTMVPKLFERYTRHGALPIRQDDCSYVWQIPAENRCNWVRETRDCRTDSLIQYTEILFCTFTSENKPLFVFGLMLMVIWLLYLFFILGTSADNFFCPSLAVIASVLRLSDNIAGVTILAFGNGAPDIFTSLVSGADESIIMFTELIGAGVFVTTIIAGSVSVVRPFRVELKFMMRDACFYIMTVLWISFVVRDHRVHLWEAAKRIPSVPDEDILRTYLVNKEDDTIPEIPIKSRAAGLRAKLDVAIAVELQRLRKKEEKPIIEEVGRPKGLFREFFYDINPISKEDWQDANAFIKFILIIRAPFMCILQLLIPLVSVTTVKRGWSKLLNCFQLCVTPTFALFVLNVTTAISFSSSFPVWAVRIGPITLAPIFLLIGTIFGIIVFLITDKDHIPKFHNAFAFFGFFTAMMVVYLVAKEVMAVLQCVGYAFSISDAMLGITLLAWGNSIGDLIANVTIAKQGFPRMGYAACFGGPMFNTLLGLGLTYGLEAAKDPNYLTMMRLSDMAPGCLAFLVCSLFMSIIYLNITGAIARKSYGFLLYSIYFSFLLIQFLSELHIIHPLGIDHRPDIDPKGQ

SEQ ID NO: 7416 - protein, 541 aa, Acyrthosiphon pisum
MRTTKMDYRLQLVTLLLALGCCRGLPNNTRPYNILVFLPTETKSHFMGFQPLLETLVTRGHNVTLVSPFALGSGGTALTYYTHVKVEITENVAGPVNFLDRNSLMNRLPLYMYTLWLGPMITKTAVDKKSVRDFVLGDRSAFDVVVVENFFHECFVTLGHKYGVPVVQLLPFAANPRVSQWHGNPYGPAYIADFASDFVAPMTFAQRAQNAVATLFNTWVNRLLYMPMQRAIMDEHFAYAGHEGRPDLETMLRNVSLTLVNSHPMIGPAAPYVPSYVQVAGMHMKPAGPLPTDLKTILDSAEHGVIYFSLGSVVKSSKMPQETVSLLLSELAKLKQTVLWKWEDDQLPNLPKNVMVKKWFPQNDILGHPNCRLFITHGGILSLIEAVYHGVPMLSIPVFGDQAHNSIEAQSRGFALYVPFFELTAENFGSKLQQLLRDPGFGEAAAKASSIIRDNPTSIMDKAIFWIEFVVRHGGAPHLRTVANQLYWFQYYMLDVIAAAMALLAVVSYLNFKCLAYLLKKIFGGSKRPASKVSKIKKKRQ

SEQ ID NO: 7417 - protein, 535 aa, Diuraphis noxia
MDYRLLLVTLMIAVCCCCGLPNITRPYNILVFLPTETKSHFIGFKPLLETLVTRGHNVTLVSPFGLGSGGTPLPKYTHVKVEITENVAAMDFLDRNSLINRLPLYMVQLWLGPMITKNAVDKKSVRDFVLGDQSTFDVVVVENFFHECFVTLGHKYGVPVVQLLPFASNPRVSQWHGNPYGLAYMADFVAGYVAPMTFPQRVQNAVAALFNTWVNRLLYMPQQRAIMDEHFAYAGHEDRPDLDMMLRNVSLTLVNSHPLIGPAAPYVPSYIQVAGMHMKPAGPLPMDLKIILDSAKHGVIYFSLGSVVKSSKMPREIVSFLLSELAKLKQMVLWKWEDDQLPDLPKNVMVKKWFPQNDILGHPNCRLFITHGGILSLIEAIYHGVPMLSIPVFGDQTHNSIEAESRGFALYVSYFELTAEIFGSKLRQILRDPRYGEAVAKASSIMRDNPTSTIDKAVFWIEFVVRHGGAPHLRTVANQLYWFQYYMLDVIAATMAALAVVSYLNFKCLSYLLKKISGGSKRSASKVSKLNKKKQ

SEQ ID NO: 7418 - protein, 534 aa, Ooceraea biroi
MKTKMRMLPVIFVWLFWLPICAAYRFLGVFPIAFKSHFVILESVMKGLISKGHQVDIISPFPQKTPYPNYTDIANLTAPLSFVNNFTYEHMTQIVADNNPAILIGLINGNDICEAHLGNPVIQNLVRNPPKDPPYDAMIIEVFGAHCFAAIAELLNIPLIGLSTTPLLPWHNELIAQPENLAFVSNLFANKESPTNLWQRTYNTLYNLYCKLYFTYLTRPQDELVRKYFGPNLPSIQKMNLALVLINSHIVLNGIQPMTPAAVQIAGIHIRDDESPLPQELKKWMDDSKDGFVYFTFGSMVLIETFPRKILDVFYASLGKIAPVRVLMKVPNPEKLPAGLPENIRTFRWMPQVKVLKHPNIRAFVTHGGLMSTLEAVFLGVPMIGIPLYSDQFKNMETYVTRNIAMKLDIHKISEEDMSAALNAILHDPRYMENIRNLSQRLLDQPLNPVDTANYWIEYVIKYGDDVLRSPAMALAWWQICLIDVAACLLLCAAAIITFAMFIMRFVVKMINEKHHLLLYLKKIGSIEPIRGKF

SEQ ID NO: 7419 - protein, 531 aa, Bicyclus anynana
MLFHNINVVAAVLSALLLLAGYTESANILHVIPFSAMSHYIFLRHIGLELAQRGHNVTVITTHKEKNPPSNYHQVQVQKKQIWELIGGERPNIFDMAELSSEEFHHKVVWPGGLAFTELTLNSSDVQEFLKKDNTFDLVICEQFVQEALYTLASKYNAPLVIISTFGNCMRHNIMTRNPLQLATVLAEYLKLNNPGNFWGRLRNLYFTVYEYLWWRYWYLEKQEDLVKKYLPDLIGKTPSLYEMQKNASLMLINSHFSFDTPTAYLPNIVEIGGMHVRKSNKSLPEDLQKLLDESKHGVVYMSFGSNIRSAELPEHKKKAFLNVFKELKQTVLWKWEEDVLEGKPKNLFTGKWLPQQEIIAHPNIKLFITHGGLIGMQEAIYNGVPIVGVPIFSDQYNNVLLAEEVGVGKLLHYNDFNEDTLNKTINEILNNDSYLKTAREVQKRWNDRPMSPLDTTIFWLEYVIRNKGAEYMKNPARNMSWFEYTMLDVYAFILLIIVAVLAFFVKLILIVRAIVYGKQTNKMTKRKKRL

SEQ ID NO: 7420 - protein, 1044 aa, Pieris rapae
MSPSNTLLIFLIGITSNNAARILGIFPTPAISHQGAFRPIIHELARRGHQVTVLTTDPAFPKDKPLPNLTEIDVHELSYADKDEWLEKSENSKEGFFKELKKIFERITILLELQIQVPEFKELYKEKFDLLLIEAYVRPLLGLGHVFNVPVIQISSLGGGPFTYSSFGAPSHPLLYHSVISQRLYNLTLIEKAQELFKNYFVEYLLAQTEEFDYEMMKRNFGEDVPNFEELQKNVQLLLLNEHPIWANNRPVPPNIIFVGGIHQPQEQELSKELKHVLDSSKNGVIYVSFGTSVKASVLPPERIGAMVKVLSQLPYDVLWKWDKDDIPGKGKNIKLFKWFPQSSLLKHPNVKLFITQGGLQSTDEGINAAVPLLGIPMLGDQWYNVEKYVHHKIGLQLDIYQLTEENFRNAIESLIGDKSYKENIVKLRSLMREHPVGPLELAMWGIEHILKYGGSHLKSPAAGMSLMEYYEVPLLLAATAILITAIAVMIFTAIFIWRMVKCCFKSRVTKKKIKSNLKQVSDNRLSNFTMYRLTILVLSCVVTVANTAKILAVLPTPSVSHQVVFRPLMQELARRGHDLTIITADPIYTAGNAPKNYTEIDVHDISYKIWMDAFTHGVRFGKKDDMFAQMRSFTVINPSVAIAQFKEKQIQDLYKRKEKFDLIFIEAWETQGYYYSHIFKAPVILISSFGMFGNEDAAVGAMTHPFLFPKLVQQRTYNLTFWEKAKELYRNYWFRKLWSTMEENDRDLWGQLLGEEVPDFKEINNNIDMMFINVHPLWISNQPLPPNIITIWGIYRNQRKPLPTDLQNYLDSSKHGVIYLSFGSNAHSSVLPPEWIQLLVRVFSRLKYDVLWKWEKPELPGKSENIKISKWLPQSDLLRHPNVKLFITQGGLQSTDEAITAGVPTLGMPMLGDQWYNLEKHVHFKIGKKLEMETLTEEELETAIHTVINDPSYKENILKLRTLMEDQPESALDRAVWWTEYVLRHGGAKHLRSANANMSWVEFYEVEFVLKAASLLLLLLVLGVAFLYYTYITFVTKQKLKTH

SEQ ID NO: 7421 - protein, 520 aa, Trichoplusia ni
MRVLLYFVTCFILFINFNEAARILVVIPTPSISHQVVFRPVVQELAKRGHDVTIITTDPAFPKGGTPGNLTEIDVHDISYRVWREHFMKASKTDGGDLYNQLNTIVTVGLRVFVEQFNDANVQRLIKDKNQKFDLIITEALSRTALGYQHIYKAPLILMSSFGATFDNFEALGLPTHPLLYPTIIRQRINDLTMMEKISEVYTSFRLYNMFSNFLVEEEKTMKKLYGPDVPSVNEFYNRIEMLFLNENPVFTGIRPVPPNVIYMGGLHQNPLKELPKDLKLYLDSSKNGVIYISFGTNVDPTQLPADRIQALVEAVSQLPYDVLWKWNGDELPGRTENIRISKWLPQSDLLRHPKIKVFVTQGGLQSTDEAITAGVPLIGIPLLADQWFNVERYVTHGIGVRLDIATLTAESFKNTLLKVIEDDSYPQNTVKLRTLMRDQPLTPLERTIWWIEHVLRHGGAKHLRSPAANISWAEYLELELVLTLLAGLLAAISVVVLSIYWLFKYFVGYNVLNSKVKRS

SEQ ID NO: 7422 - protein, 468 aa, Caenorhabditis remanei
MKYVIFLLTIFPLSLSYNFLVFCPLFGHSHTTFFAKIADTLSDAGHNVTFFTPTVTRKYTKINYVRSTKNVIHLEPSEKLALIGDKFQMSDPSKFWKQDSSIYEILPMIDTFFEMFVELTKVLEENLELLDKLKEENFDVMIFENIVPPAYSVLDYLQIETFIPSTSIAFDNSLLYSIGEPFMPSAIPFPISEFSDRMSFSERLVNSISIPIMNTFLPKREFKSFRPPYSFIKMASLEPLSSFIFTNSNPYIDYPRPTLEKNVQIGGISVDIEKLRNVKVDEKWDRILNMRSKTVLISFGSFMLSKDMPLEYKKALARAMATFPEVAFIWKYESDDTTSFAQGIKNIRFPKWIPQTALLADSRLSAFFTHGGLGSVNEVSYLGKPTTLVNLESTVSSFVPSQFQCPIFADQMRNAKMLTRHNGSIVISKYELADSNKIEEVLRIILFDKSTVLTSSIPGSILSTHVIH

SEQ ID NO: 7423 - protein, 521 aa, Fopius arisanus
MTFLRALLLLGGVLILQTQGTSALRVLGVFPLPGKSHFILAENLLKEMARRGHSVDMVSHFPTKNPIPNYRDISLRGSLPIAVNNISFEETRTFSGFSMAFFVRHTGTQICELLGTPYLEELLRTPKGTYDVIIVELFTAQCYIALGKHLDAPVVGLVASKMHDWLFDPFANPLNPSYMPSLFSSFSQRMTFWERLTNTFVMNVIGLQINYYLNEQIEYVEKNFNRRISSINDLYNDVSLLLVNEHFSINEIKPATPDVIDVGGLHVHDDDQMVTPELEKWLDASTEGCVYFTFGSMIRIETLPPEKLKILYETFEKIAPVRVLMKIADPKILPKGLPKNVMTSSWMPQVAVLKHKNVRAFITHGGLLGTQEALAHKVPMIGIPLFGDQHTNIRTYQNKNIAIALSIDTLSVDGLTNAIIAVLNDPKYRKNIAHISDLFLSRPMSALDTAVYWVEYTARHGTVMKSPATELSWWQLYLLDVYGFIITCALIILYVLKKIVTTVWSCCKRNQTPISKSKKNR

SEQ ID NO: 7424 - protein, 530 aa, Sus scrofa
MAPVVLTRFLPLCVCLLLSPGFAEAGKLLVVPMDGSHWFTMRSVVEKLIHRGHEVVLVTPEVSWQLTNSFNMTVKTYSTTYTLEDLNREFQIFSDFQWKARQMSMFSMLMSESTKFFDYFFSHCGSLFNDTKLVKYIEESSFDAVFLDPFDMCGLIVAKYFSLPAVVFTRGPFCHHLEESTQCPMPLSYVPRELSAFSDVMTFGERLRNHIWHLEERLFCHYFVKRALEIASEIFQTKVTAYDLYSQASVWLLRTDFVLDYPKPVMPNMIFIGGINCHEGKPLPKEFEAYVNASGEHGIVVFSLGSMVSEIPEQKAMEIADALGKIPQTVLWRYTGPAPPNLAKNTKLVKWLPQNDLLGHPKARAFITHSGSHGIYEGICNGVPMVMMPLFGDQMDNAKRMETRGAGVTLNVLEMTSKDLENALNTVIKDKSYKENIMRLSSLHKDRPIEPLDLAVFWVEFVMRHKGAPHLRPAAHDLTWYQYHSLDVIGFLLAVGLTVVFIAFKCCVFAYRKCFGKKGRVKKSHKSKTH

SEQ ID NO: 7425 - protein, 531 aa, Pteropus vampyrus
  MOD_RES (56)..(56): Any amino acid
MAAGSQGPRLLVLGLLLCVRGLSVSQGRKLLLVPLDGSHWLSMHGVIRQPHQRGYXVLASVTSVYITEGAFYTLKRYPAPFKREDLEASFISLGRAVFENQPFLQRVVKTYKKVKKDSALLLSICSHLLHNKELMTSLAEGNFDAVLTDPFLPCGPIVAQYLALPAVFFSSALPCSLDFQGTQCPNPPSYVPRLLSFNTDGMTFLQRVENMLVALLENFLCSAVYSPYASLASEVLQKDVTVQDLLSSASIWLLRSDFVKNYPRPIMPNIVFIGGINCASQKPLSQEFEAYINASGEHGIVVFSLGSMVSEIPEKKAMQIADALGTIPQTVLWRYTGPRPSNLAKNTILVKWLPQNDLLGHPMTRAFITHSGSHGIYEGICNGVPMVMMPLFGDQMDNAKRMETRGAGVTLNVLEMTSEDLANALKTVISDKSYKENIMRLSSLHKDRPVEPLDLAVFWVEFVMRHKGAKHLRPAAHDLNWYQYHSLDVIGFLLAVMLGVVFIVYKCCVFGYRKCFGKKERAKKSHKSKVQ

SEQ ID NO: 7426 - protein, 518 aa, Acyrthosiphon pisum
MSHKSMISIVIFTLVSCTCIQSGNTARILAIETFAGKSHWNFMSSVLRAMTDNGHNVTVFTPFLDGNRENYTEIDMSNIFPMKLNMSLVRMRNIFNNWFTPISFMMKNDGRRSCEILHNNDQLNDFLENKLQTDFDAIVIEPGIVSGCLSYLGANSNLPVIYTTPIPINTYTERITYGDVSNPATVSPMLFNFAVPKTFNQRFTNTLIWLYSSIIVKFQEFLLQLFDSKPYDLGTINPPSLVFMNTHFISDKSRPTPSNVVNVGGIHLKPYKKIPKDILDFIEDSPHGVILFTFGSTTAMSSIPKYILTAFREALAELPQKVLLKYEGEMEDKPKNVMTRKWFPQRDILLHKNVKVFISHGGISGLYEAVDGGVPVLGFPLFGDQYRNIDNLVEAGMGISMEIYAVTKDTFLKNLLDLVNDEKYIKNAKITSEIFKDRPISPEKSVAYWTEYVIRHKGAPHLKSQALNLTWYQYFLLDIIAVILIFILIFILIVLKFFKFIHTIYYKICSSLSKVKSD

SEQ ID NO: 7427 - protein, 518 aa, Spodoptera litura
MVGFRKILLCIALQVIFADAARILAVFPVPSFSHQITFRPITMELIKRGHEVVVMTPDPMFKKGETPANLTEIDVHDISYQASQVFMEAAKGKKEDLITQMKVASEMLIDVVDLQYQTKEMKDIIKGKQHFDLLLVEACIRPALAFSHVYKVPLIQISSFGAIFDNYAVIGAPLHPFLYPSSMNQRIYNLTIYEKLYELYNNYMIDQMSNGMAVEEYKMLKKHFGPDVPEIKELQNRVEMMFLNVNPIWEGIRPVPPSVIHLGGLPQKPHKELPQDLKSYLDSSKNGVIYISFGTNVKPSLLPPEKIQTLVKAFSKMPYDVLWKWDKDELPGRTANIRISKWLPQSDLLKHPKIKLFVTQGGLQSTDEAITAGVPLVGVPMLGDQWYNVEKYVHHGIGVKLELISLTEETFSTAVNTVIGNESYRKNIQKLRTLMTDQPMKPLDRGIWWIEHVLRHGGAKHLRSPVANISWAEYLEFELIAIVLSALLAALAIAIAVVYSLYGFVTRNYIIKAKVKSS

SEQ ID NO: 7428 - protein, 519 aa, Ceratitis capitata
MSKSTPSHLLFLLGLCCTLVQASYPLKILGLFPHPGISHFHFFHPIMRGLAEKGHDVTVISHFPDKSPPARYKDLPLTNLETLSDSVDLKFFENRRFYNHFVEFFLLYEWGRSACNTTLRSDALAQVLRQRQRFDVVIMEQFTSDCMAAVAHQLKAPFIGLSSCALMPWHYGRMGMPMIPSHMPALFMGQAESMTFSARLANWFTFHAMRLLYDFYTTPSTDALVQYKFGHDIPSVGELAKETSLMFVNQHFSLTGVKPLPPSVIELGGVHIQKAKPLDPELQKFIDNADHGVVLISWGSMVRANTLPPAKRDAILRAIKRLKQRVIWKWENGTLEHKPDNLYVSKWLPQRDILCHPNVKVFMAHGGLMGTSEAAYCGVPMVATPFYGDQFVNSAAVKYRRMGVVLHYEDITENSVLRSIREVLKKEYMDNAKAVSFSYRHRPQSALETAIWWVEYVAKTEGAPLTKGHAVSLSGFVYYSLDIYLFLAFVAVISVLSWRFVWNRICARRPKAPVKQKTN

SEQ ID NO: 7429 - protein, 532 aa, Gallus gallus
MALVLPSHPQVSVSLLLLLSVLGLAAGGKLLVVPIDGSHWLSMREVLDELRQKGHEIVVVAPEVSLYIKPSENFIMKMYPVPFTQEEVDGMFRRTGQDAFMEGSFLERFIKAYQGVKNSSAMFLSTCEQLLYNKELIRYLQENKFDAVFTDPILPCGQILAEHLSVPSVFYLQQIPCGLEFEATQCPNPPSYIPRIFTDNTDHMNFLQRVENVIFSISNFFLCDVVFQPYAKLASEFLQHDVTVPGLLSKASIWLIKLDFVLHYPRPLMPNMIMVSGVNCAHKKLTQEFEAIVNASGEHGIVVFSLGSMVSEIPMKKAMEIADALGSVPQTVLWRYTGEVPPNLPKNVKLVKWLPQNDLLAHPKTRAFITHGGSHGVYEGICNAVPMVLMPLFGDQMDNAKRVESRGAGLTLNILEMTSKDISDALKAVINDKKYKENIQRLSDLHLDRPIHPLDLAVHWVEFVMRHKGAPHLRPAAHDLNWIQYHSLDVFAFLLAVVLLSLFISVKCCMFCCRRCCFKKGRKSKSGKSKTH

SEQ ID NO: 7430 - protein, 289 aa, Oesophagostomum dentatum
MYFSSPLVDHVAQKVGVPTIPSYVPPMPMESHDTMTFYKRTKSFLGHVLTYLFWDRIIVNPEVELFRELVDPAFPHLNDLAKKCPLVMVNSNELYELPRPTLAKVINIGGLGIQLQQSKPLPEEIENIIARGEGAVVFSFGSLTPARRMPESWKEAFFKAFKRFPHIQFFVKYDGDDVNEMLSKNVHLMNWLPQMDLLYHPKTKAFITHAGYNSVQEAIHAGVPMICLALFGDQPKNAKVTEKLGISVNLKKTAISEEAVVAALQEVLNNERYRLKALKFFFINNRFGF

SEQ ID NO: 7431 - protein, 496 aa, Caenorhabditis brenneri
MADVIADHGHNVTLFQPFHNAMKNTEGLVKNKNVEIINYYPDHFDELVNLPTETFPLFWDSQLMNNPILQAFMMPRALAGQFERTAVQLLKDQKTLDELKSRNFDVMIVETFEITGFYVAQLLNLPFIPTMSGVRFPCFNDLFGQPSGLGYYPWIDSKLAPEAGFFDRLNDLYRNFFMYRMMDGMGDLQYAYIEKAIGKPVPYWKDLIKESPIYITNSNPYLDFAVPTTAVIVHAGGMTIDLKKMKHVGKLPEEYEPILNERESTVLISFGSVIRSFQMPENFKAGLIKMFESLPEVTFIWKYEQDDEEFQKRLPKNVHLKKWVPQPALLADKRVKVFVTHGGLGSTMEVAYSGKPALMVPIFGDQPQNAYMLERHGGAIAYDKFDLKDGEKLTKTMKDMVENPKYEENARELFKILSNQPIDPKMNLMKHLEFAMEFPKLRAQVPAINHANFIAHYYIDALAFVALAGVLIVYSTVKILRRILPIKLVSTKSKAE

SEQ ID NO: 7432 - protein, 521 aa, Papilio xuthus
MLFKGLYILLLSFTIVSVKSANILAYFPCPSISHQVVFRPITLELIKRGHTVTVITTDPIFPKGEAPANLTEIDLHDASYSLLLKNVPKFILGRRSDFVHQIHLLKDFIPKMIEEQMNVSEVKELLNDKSKKFDLILVEAFYLMALGITHVFKAPTVLISSFGAFIGSYEIVGAPTNPPLLYRNIFSQRLYNMTVWDKLNELYTQLNIRYAMTDLEIEENKALKKIFGPDAPTLTELKNNVQMLFVNINPIWEDNYPVPPSVVHMGGLHQKPQKELPKDLAQLMDESKNGVVYFSFGTNVRPSALDAAKLDVFHKAFAKLPYTVIWKWDDESLLPKSNNVKIFKWLPQADLLRHPNLKLFITQGGLQSTDEAITAGVPLLGIPMLGDQWYNVEKYVYHKIGVGLDFENLTEEQLKQTILEVAENDSYRKNIERLRSLMEDQPQKPLERAIWWLEHILRHGGAKHLRSPAANISWSEYLEIELVSLILTILVTSLLIVILVTRYIFRKILQLYRIYNKEKVL

SEQ ID NO: 7433 - protein, 504 aa, Lucilia cuprina
MSFKLNTTLLLLIFAGSYQSTQAAEILALFINGHQSHLLVYASVVNLLLQRGHQVTVVTTLDVADIIDVQNIRWLKLSENYTETVITTGSKRMNSFNKLERMFNRIENTSKFMKDPQWVSFLNEDNNYDLLILGYLFNDYQLGVSAHFKCPVVLIWTSQPIGFVQSLMGNPEERWYVSQPYDSHQYNGVKAIAFGWFEKFVELLALDRMQEIYTKYFPANHYPSFKEIRKTVSLVLCNHHSLSEGPIAPFLPSIIEIGGIENKFVSQRNQMNLSDFITSKQKIIYFSFGSRVKWSLLPESLEQIFIETFKVFSNYTVLWTYDKNCTKLEMQFPFSNVKCQAWWPQSSILNYPQTKLFITHGGKGSITESQLYGVPMLGIPFFGDQKVNVYKMVDKGFGLKLDLRNITYKNVVVNIKQILDYTKYVNNIKIFSELYHDRPISNEQNAAYWLEYVLRYKGAKHLKSPVLQLNFFQYYLLDVYTLILVGFLTIVSILNILERKIMQQ

SEQ ID NO: 7434 - protein, 353 aa, Fopius arisanus
MTFLRALLLLGGVLILQTQGTSALRVLGVFPLPGKSHFILAENLLKEMARRGHSVDMVSHFPTKNPIPNYRDISLRGSLPIAVNNISFEETRTFSGFSMAFFVRHTGTQICELLGTPYLEELLRTPKGTYDVIIVELFTAQCYIALGKHLDAPVVGLVASKMHDWLFDPFANPLNPSYMPSLFSSFSQRMTFWERLTNTFVMNVISLQINYYLNEQIEYVEKNFNRRISSINDLYNDVSLLLVNEHFSINEIKPATPDVIDVGGLHVHDDDQMVTPELEKWLDASTEGCVYFTFGSMIRIETLPPEKLKILYETFEKIAPVRVLMKIADPKILPKGLPKNVMTSSWMPQVAVL

SEQ ID NO: 7435 - protein, 533 aa, Elephantulus edwardii
MAVGVWILPWVVRALPLLLCVGPSAEGGKVLVVPMEGSHWLSMKKAVQELYARGHQAVVLAPEANLLIKEEDFFTLKTYAFPYTQEQLEENFLQHSHQIFVPEHFLKTFFRALENLQNMVSMHQKSCSDLMYNKDLIKYLNESSFDAVLTDPVNPCGAVLAQYLSIPAVYFLRFIPCELDFAATQCPNPPSYIPRFLTRNSDHMTFLQRVKNMLYPLALKYMCYVSYAPYASLASELLQREVSVTDMFSYGSVWLFRGDFVMDYPRPVMPNTVFIGGINCVSREPLSQEFEAYVNASGEHGIVVFSLGSMVSEIPEQKAREIADALGKIPQTVLWRYTGTRPSNLAKNTILVKWLPQNDLLGHPKTRAFITHSGSHGIYEGICNGVPMVMMPLFGDQMDNAKRMETRGAGITLNVLEMTSDDLANALKAVINDKSYKENIMRLSSLHKDRPMEPLDLAVFWVEFVMRHKGAPHLRPAAHDLTWYQYHSLDVIGFLLAIVLVSTFITFKCCAFGCRKCFGKKGRVKKTHKSKTH

SEQ ID NO: 7436 - protein, 534 aa, Sus scrofa
MAMGFQAPLPMLAGLLLCLCVVVPWAEGGKVLVVPMEGSHWLSMRKAVQELHARGHQAVVLSPEVNMHIKAEDFFTVKSYATPYTQDEFDDLMVRHLHLLFEKANFLTMFWTTMVSLKKVFLMFERSCEELLNNKDLIRDLNASSFDVVLTDPVYPCGAVLAKYLSIPAVFFLRSLPCDIDFEGTACPNPFSYVPRLLTMNSDHMTFFQRVKNMLYPLALKYICHVFVTPYAQMASKLLQREVSLVDVLSSASVWLFRGDFVMDYPRPVMPNMVFIGGINCANRKPLSQEFEAYVNASGEHGIVVFSLGSMVSEIPEQKAMEIADALGKIPQTVLWRYTGPAPPNLAKNTKLVKWLPQNDLLGHPKARAFITHSGSHGIYEGICNGVPMVMMPLFGDQMDNAKRMETRGAGVTLNVLEMTSKDLENALNTVIKDKSYKENIMRLSSLHKDRPIEPLDLAVFWVEFVMRHKGAPHLRPAAHDLTWYQYHSLDVIGFLLAVGLTVVFIAFKCCVFAYRKCFGKKGRVKKSHKSKTH

SEQ ID NO: 7437 - protein, 520 aa, Acyrthosiphon pisum
MDYIVRSLYLLTVFLIFSTFRGPWMQPAESANILAIETIAGKSHWNFFSSVLRSLTDKGHHVTVFTPITEGNRENYTEIDTSGDLPKKREIGLTDMMKVFGDPIKTLWFGPGIARSYCDIIHGNERLKDILEGFVHTDFDVILIEPVWLDCMSYVATKLNLPMIYLVPQSMVTFLEYSYLGHVPNPASVSNFMADHGVPKTFVQRFTNTALLSYSLLTFSCFEFLLKYREPKPYDVLRPVRPSVMFVNSHYITEASRPFFSNFVSVGGIHLNAVQNIPNDILEFIENSPHGVIYFTFGSVVSMSTLPDHIQNAFKEAFAQVPLRVLWKYEGEMKDKPINVMTSKWFPQRDILMHPNVKLFISHGGISGVYEAVDAGVPVLGFPLFYDQPRNIDNLVEAGMGISMDLLTLQKDELLTNILELINNEKYMKNAKIVSDRFKDRPMSPAESVVYWTEYVIRHKGAPHLKSHAFNLTWYQYFLLDVIFVIFIFISFVIFIIYKLFKTIYYYFLKYSQTIKPKLQ

SEQ ID NO: 7438 - protein, 533 aa, Myotis brandtii
MATGLQLPPPLLMGLLLFLCVGPWTEGGKVLVVPMEGSHWLSMREVVKELHARGHQAVVLSPEATLHVKEEDYFTLKTYAIPFTQEEFQYLMLGHIDLVFERAHFLKTFLNSIVILKNVSSVYQKSCEELVHNQDLIRHLNASAFDVVLTDPVYPCGAVLAQYLSLPAVFFLRAIPCDFDSEGTQCPNPSSYIPRLLTRNSDHMTFLQRVKNMLYPLALKYICHVSLSPYARLASELLQREMSLVDVFGYASVWLFRGDFVLDYPRPIMPNMVFIGGINCANRKPLSQEFEAYVNASGEHGIVVFSLGSMVSDIPEKKAMEIADALGKIPQTVLWRYTGTRPSNLAKNTILVNWLPQNDLLGHPKTRAFITHSGSHGIYEGICNGVPMVMMPLFGDQMDNAKRMETRGAGVSLNVLEMTSEDLENALKTVINDKSYKENIMRLSSLHKDRPIEPLDLAVFWVEFVMRHKGAPHLRPAAHLLTWYQYHSLDVIGFLLAIVLGVAFVVYKCCAFGYGKCFGKKRRVKKSNKSKAH

SEQ ID NO: 7439 - protein, 529 aa, Caenorhabditis remanei
MNFLLLLTLFPVISGYNYLIISPVFGYSHMKFMGKVADILADAGHNVTFLQPILYDYYAHKKVVKNSKVEVVNFEMDEEGKAAASGPSVFKFLWDAKMPSNPISGAKVNSGKLYKEFEHICRRMLTDKHLHEWILSKKFDSHISEAFDFCGLYLGDYLNLKSPIPLYTGVRCGAASYAVGEPIPLNYLPTEGSKYGDESTALDRLNDILGLTAYHYQFALLFDKQYDQVFKLTGGKVRTWQEILQRSTFFLTNSNSYLSFSTPTISKVIQVGGCTIEPPKSTKLDDHFDKILSLRKNTILVSFGTVIQSSDMPTHFKNGLVETFRKMPETTFIWKYEEEDEKLRKELPENVVLSKWVPQPALLADSRLGVFVTHGGLGSTMEVGYAGVPSVMIPIFSDQGANGEMLSRHGGAVVYSKFDLPNSDKLVNTFRKILNNTDYKKNAQRLSDILHNQPMDPKQVLLNHCEFVARFGKVDSLEPHANKYNFIKYYCLDSLALVVCVLLTVLYVIFKLLFFVYNCSISYLKLKQE

SEQ ID NO: 7440 - protein, 523 aa, Drosophila yakuba
MCLGYCWLTVCLCLLLQQDLHQELAQAANILGIFPYRHISPFFVMQPLARTLAKRGHNVTLITPYGMPNDIDGVRHIRVAQLNERIKEMLESDQVLDFMINKWTESTLTAKALFNASYDILSDPGVQRMLHDRNESFDLIIMEPANLDALYGLVEYYNATLIGLSSIRINWHTDELAGNPAPSIYEPISPVGYSLETSLLSRIYNWIHIMEEKLVDYLILRPAQLHLFQKFFGYSSQKMNELRSRFSLMLINSHYSMGKVRANVPNIIEVGGIHLSEPTEPCDEELQKFLDEAEHGVIYFSLGNDILIKFLPVNIQEFLLQTFAKLKQSVIWKSELLYMPNKSDNVYVIEQAPQRQILYHPNVRLFITNGGLLSVMEAVDSGVPMLGLPMFFDQFGNMRWAQLSGMAEVIDINTLNEDILTDTIKHMLGNPSYSVKAKEMSQFFKDRPMSPLDTAVWWTEYALRNRNITRMRLNLEEIPLFEYYKIESLLAFSVRFGLVAVSLIFLVYTLLLKTRVRPRRLHP

SEQ ID NO: 7441 - protein, 522 aa, Diachasma alloeum
MSLIKLLFLFTLILLIHNENTSALKILAIFPFAGKSHFIGGEHLLKKLTRRGHSVDVVSHFPQKDAIPNYRDISIRGSSPIIANNVTFDNFSKFNSVQHKNFVEAAGTDVCDLLGFHVLQELMETPKGTYDVIIVEFFAAHCYIAFGQKLNAPVVGFGTSKLQDWLFGHFGNPLNPSYMPSYFSTFAQRMTFWERLQNTLLISSVCIQFDHYLKTQISQVEKHFGRRISSIDELFNDVSLVLVNEHFSTNDIKPATPDIIDVGGLHIYDNTQRLAPEVQNWLDESIEGCVYFTFGSTVNIESFPKDLLKAFYQSFEKIAPVRVLMRGDPKAHLKDLPENVMILPWISQIAVLKHKNVKAFITHGGLLGTQEAIAHKVPMIGIPFFGDQHTNMRNYENRGIAVILDVKTLNENSLTNAINTVLKDPTYRKNIAKMSALFWDRPMSPVDTAIYWIEYAARHGPVLKSPATELSWWKLYLLDVYGFMLMCILAIIFTIIKLITLLCRCASGTRPKNKVSRANKNK

SEQ ID NO: 7442 - protein, 523 aa, Mus musculus
MAAHRRWLLMSFLFLEVILLEAAKILTISTLSASHYIVISRVSQVLHEGGHNVTKLLYESANIPDFRKEKPSYQVINWRPPEDQEKKFADLRHRLTEEITYGRSKHHTLLKIHQYFGDLCSQLLSRKDIMDFLKNENFDLVLLDSMDLCSLLIVEKLGKRFVSFLPFQFSYMDFGLPSAPLSYAPVYGSGLTDQMDFWGRVKNFLMFLDFSMKQREILSQYDSTIQEHFVEGSQPVLSDLLLKAELWFVNSDFALDFARPLFPNTVYVGGLLDKPVQPIPQDLENFISQFGDSGFVLVALGSIVSMIQSKEIIKEMNSAFAHLPQGVLWTCKTSHWPKDVSLAPNVKIMDWLPQTDLLAHPSIRLFVTHGGMNSVMEAVHHGVPMVGIPFFFDQPENMVRVEAKNLGVSIQLQTLKAESFALTMKKIIEDKRYKSAAMASKIIRHSHPLTPAQRLLGWIDHILQTGGAAHLKPYAFQQPWHEQYMLDVFLFLLGLMLGTLWLSVKVLVAVTRYLSIATKVKEA

SEQ ID NO: 7443 - protein, 533 aa, Pelodiscus sinensis
MAPSSQSEHPIVSRLLLFLVVCSLAEGGKLLVIPVDGSHWLSMCQVLEKLSLKGHEIVVVMPEVSLLIRPSLYYSVKTYPVPHTKEKLDVFFQSLIYLIFDDGPILKKVFIAYESFTSVNTMMLTTCKHFLLNKELIRYLEDSKFDAVLMDPVLPCGPILAEYLSIPSIYFMRGLPCGLDFKATQCPSPLSYVPRLFTSNSDHMPFTQRMKNLLVTATENFLCYLFYSEYERLASEFLQRQVTVLELFSKASIWLLRYDFVFEYPRPVMPNMVFIGGTNCKQKKSLTKEFESIVNASGEHGFVVFSLGSMVSEIPMKKAQQFAEAFGTIPQTILWRYTGQPPPNLANNTKLIKWLPQNDLLAHPKARAFITHGGSHGIYEGICNGVPMVLMPLFGDQMDNAKRIESRGAGVTLNVLDMTSKDLSAALNTVIYDKSYKENIMRLSALHLDRPIHPLDLAVHWIEFVMRHKGAPHLRPAAHDLNWIQYHSLDVIAFLLAVVLVAMFISWKCCLFCCRKCFCKKGRVSKSSKTKAQ

SEQ ID NO: 7444 - protein, 525 aa, Megachile rotundata
MRLLLTVLAAVLTFGQSTEGLRILGLFPLNGRSHWIMGERLLTSLAERGHTVDVVTHFTVKEPPANYTEISLEGTLESAVNKLELSHVVQFNNQNFELLTRMVGDQICKLMDYPKLKQLIDNPPKDPPYDLVIVEMFLASCYLAFGRHLNVPMVGVVTAGSDEWFTEKLGNPFNPSFVPSLFTSYDQKMNFWQRLMNTFLTNMVAFQLDRYVNPQQQYVQKYFGINATITDLYHDLDLLLVNSHHSLLGIRPLTMGIVEVGGLHVKDDGKPLPADLQKWLDESKHGCILFTFGSMVRIETFPESLLRSVYKVFEKIAPVRVLMKVGKKEELLPGLPKNVMTKPWFPQVAVLKHKNTKAFITHGGLMGLQESVHFGVPLVGIPLYGDQHGNLDSASKKLFAVNLRSFKEVNEKTLGDAINTVLYNETYRANIKKVSELFKDRPMSAVDTAIYWIEYVARHGKILQSPAIHLSWWQVHLFDVYGFMLACIVLILYVFVLLVRKLKRKLLDSSCDHKSKKSSNSKKNK

SEQ ID NO: 7445 - protein, 521 aa, Bicyclus anynana
MSLCVHISLTLFLASLNFYVVSSAKILAVYPTPSISHQIVFRILTLELVKKGHEVTVITPDPVYPKGHGPPNLIEIDVRELSYKIWTDVWMSDKSISEADYYSQIYFILRSMSKITVTQIVSSKEIQALIKNNKTDYDLLLIEAFVRPVLIYSHIFKVPVIQISSFGGLSYNFKAFGVPTHPFLYPAIPTQRLYNLSNYEKLQELYYQWQMENTFNEIEEEDNRSLQQVFGTDIPSIRELYNNVDLLFLNIHRIWMDNQPFPPNVIHIGGIHTNPKTKGLPKDLDLLMNNAKNGVIYFSLGTNVNTTNLPFDKIQVITKVFSQLPYDIIWKCNQDSIPGKTENVKLYKWVPQADLLKHPKIKLFITQAGLQSTDEAIEAGVPVIGIPIFGDQWYNAEKYQQLKIGIKLDLKDLTEEMFKGAIETVISDDSYRSNMKRMRKIIKDEPQTPLERAVWWVEYVLRHKGAKHLRAAGANISWTQYLELELVAIVVLFLLSILLIFFVTIYYVMKSLRAYSKVKTS

SEQ ID NO: 7446 - protein, 518 aa, Papilio polytes
MILRISVLYLLCVTLSFIESARILGVFPTPSISHQVVFRTLTHELARRGHEVVVITTDPVHPKEKVPENLTEIDVHDLSYSKWNKVVSEMEDGSRDVTSQVKAIILVGMEIFEDQMKTESVQKLLSYKDDHFDLILVEALVSYTLGFSHVFKAPVILVSSFAGVWENYEVIGAPTHPILYPSSVRDRVNNITMWEKIVQLKKDYKMMAMKKNYDMMNNLIKKVFDADTPPIQKLFDNVAMLFLNVHPIWDNNRPVPPGVIYMGGLHQNPIRELPKDIKEYLDSSKNGVIYFSLGTNVKPSYVPPEKLQAIVNVFSRLPYDVLWKWDNDELPGRSNNIKLAKWLPQSDLLRHPKVKLFITQGGLQSTDEAISAGVPLIGIPLLADQWYNVEKYVEHKIGVRIDIDTVTEEIFETAIQTVIKDKSYRENIVRLRSIMNDQPQSPLERAVWWTEHVLRHGGARHLRSPAANISLTQYLELELVFTLATILILSLYILFIVIKALWHFVHTSLSLKVKIKKP

SEQ ID NO: 7447 - protein, 532 aa, Equus caballus
MACLLRAFWRVSAVVFFLALWGMSVGDKLLVVPQDGSHWLSMKDIIEPLSEKGHDIVVLVPEVNLLLKESKYYTRRIYPVPYDEEEMVSRYRSFGKNHFAERWLLNAAQTEYRNNMIVINMYFTNCQSLLNHSETLSFLRESKFDALFTDPALPCGVILADYLGLPSVYLFRGFPCSLEFAFTRSPNPVSYVPTCYTQFSDQMTFPQRVANFLANYLKDYLFYCLYSKYEDLTWNVLKRDVHLPSLYRKVSIWLLRYDFVFEYPRPVMPNMVFIGGVNCKKEGTLPQEFEAYVNASGEHGIVVFSLGSMVSEIPEKKAMEIADALGKIPQTVLWRYTGTPPPNLSKNTILVKWLPQNDLLGHPKTRAFITHSGSHGVYEGICNGVPMVMMPLFGDQMDNAKRMETRGAGVSLNVLEMTSDDLANALKTVINDKSYKENIMRLSSLHKDRPVEPLDLAVFWVEFVMRHKGAPHLRPAAHDLTWYQYHSLDVIGFLLAVVLGVAFIVYKSCAFGFRKFFGKKGRVKKSHKSKTQ

SEQ ID NO: 7448 - protein, 518 aa, Bombyx mandarina
MNFQTIHLLVLSALACDAYKILLVFPYVSKSHAILGEGYVRNLLKAGHELTYITPYPKDPAPNLRVIQIAQHALEEKMNSTFTIEKLMHKTHAGMEMFKLVKSFINTANDTVSNTEVQQLMLDPQTHFDVVIAEWMVTEIFSGFGKIFNCPFIWSSSMEAHSLILRLIDEIPHPAYSSNTLGLFEPPYNFFQRAINTLMEIGLKVAKWFSISIEEHIYKEGFAAAFKARGLVQPSLEELRYSAALVLGNSHVSSGAPLTLPQNYKAIGGYHIDEQSKPLPKEFKNILDNSKHGVIYFSLGSVVSSKSMPAAIKTGLFEMFRSLKYTVIWKFEDDFQNIPDNVHVVKWAPQQSILAHPNCILFITHGGLLSTTETLHYGVPIIGIPIFGDQAMNVKKAVHKGIGLEVKFGSDTPKNLKAAINEVLSNQKYRDRVKELSLVYHDRPVTPAAELVHWVEHVVKTKGALHLRSQGLHVPLYQKLLLDIIFVSLLLFLGFVFFVKFMVTRYLKKKIDIRKKTL

SEQ ID NO: 7449 - protein, 516 aa, Anoplophora glabripennis
MDKYLLLLLVLSLASSLQCARILGVFQMPTVSHQSVFQSLWKELSLRGHDVTVVTPYPLKDPRLVNLTEIDMSYASDSMKRHGFQFFMRKEFAVHTKIPKIFAINYDAADAIFSNTEFIKIYNNSNEKFDVILVQTYISPIMYSLGYKLGAPVIGVASMGGYVGSHYAMGNPNPPSLYSEMFLPYNGKLTFYERLCSTLYYIWLRFYLTFVAIPRCDEIARKYLGNDMPYMGEIEKNLSLLFLTTNPIFYPPRPTVPTIIPLQRLHMKPPKPLPKDLQTILDNAKNGVIFFSLGSNVQSVNMPDRLRIVLNEAFSELPYTILWKYESVDLPGKPSNVIIKKWLPQQDVLAHPNIRAFISQTGLQSTEEAIDRGVPIIGMPFIADQSMNTRVVAEIGIGVGVDYETVTKEELKNAIIEVAENEKYKRNIEKLRDLMLDEQVPPMEKAIWWIEYVIRHKGTKHLRSPTVDISWIEYFLIDIAFVVLLISTIIIYSIYKIVKVLRNCNKATVKKNGKND

SEQ ID NO: 7450 - protein, 513 aa, Helicoverpa armigera
MMYAQSFLIFTLLITFNDAAKILAMFPVPSISHQVAFRPLTQELARRGHEVTVITPNPTFPKGGAPANLTEIDVHDISYGIWRKLYEYTSGTTSPTTQTRIAFQMMVQLVEKQLQVDEVQRLIKEEKFDLLFLEAVAPALIVSHIFKAPVIQISSFGPMNFNVETIGAAWHPLLYPNSFSQKLYNMTKWNKLEELWNFYSLEDVVRESDVLEYEMAKRLFGENAPTVKELRDNVDMLFLNTHRMWEGNRPAPPSVVYMGGLHQMPPKELPKDLKTYLDSSKNGVIYVSFGTNIQPSLFPPERVQMFIKVFSELPYDFLWKYDKDELPGRTSNIRISKWLPQPDLLRHPNVKAFITQGGLQSTDEAISAGVPMVGLPIVADQWYNTEKYVHHKIGVKLDLDELSEQQLKNAIKTVVGNKSYRENIVKLGQLMYDQPMTPLERAVWWTEHLLRHGGARHLRSPAANISWTQYLELELVLTVLSVILGLVSVLLGIVYYLWKSFTSKSVSKKVKKN

SEQ ID NO: 7451 - protein, 515 aa, Diuraphis noxia
MNILLLTSLLAVQSCPRIIFGARILAIEPCGSKSHWQYMKSILDLLAVRHHVTVITPLLTNNRENYTEIDASQVLPIYPLMGAMEMIEQYGSVMNILPPWPKRSHERDICDAFYEFEPIRDLLNRGADGRYDVIMLEPFYSPCLSYLAHKMRVPEIYVIPSSMITMESMLFGTEPNPSYVPHLLYNGAVMDGFMQRLTNVALFAYVKIVVWLTNVRMMYREPRPYDIAGIRHNPSLVFINTHFITESPRPFPVKMIQIGGIHLQPPKVLPEDILEFIENSPHGVIYFTFGSVSSMATLPKHILQTFIEVFAQVPQRVLWKYDGEISDLPKNIMTRKWFPQRDILLHPKVKLFISHGGISGVYEAVDAGVPVLGFPLFYDQPRNVINLVDAGMALSMDLLTVNKIEFLKNINKLLNDKKFSIRAKIVSKHFKDRPLPPSEMVNYWFEYVLRHNGASHLNSKAFNLTWYQYFLLDIITVVVILLVIFAYLTFILFRWFQYYTLKLYKLNQSHITVKK

SEQ ID NO: 7452 - protein, 521 aa, Gekko japonicus
MPTWLLLTSLFWSLSDGGKVLVIPLDNSHWLSMRLVVERLHQKGHEIVVVAPDVNMRIEPSLHYTLKTFAVSYTEEYMKEQLQNIGQNIFSQQPFLARMTETIARTRIISTLFLNTCKELLYNKEMIAYLEENQFDVVFMVPVSPCGQIVAERLSLPSVYYSRGFPCGLEATQCPNPPSYVPRFFTGNTDHMDFSQRVKNFLAASLEFLFCYLLYSPFHVLSTEFLQREVTVSELYSQASVWLLRYDFAFEHPRPLMPNMVLIGGINCEKKSPLIEEFEAIVNASGEHGIVVFSLGSMVSEIPMKKAMEIAEALGTIPQTVLWRYTGEVPPNLAKNTKLVKWLPQNDLLAHPKARAFITHGGSHGIYEGICNGVPMVVMPLFGDQMDNAKRVESRGAGVTLNVLEMTSKDLSDALKAVINDKTYKENIMRLSALHLDRPIHPLDLAVHWVEFVMKHKGAPHLRPAAHDLNWIQYHSIDVFAFLLAVLLLVLFISLKCSLFCFRKCFGRKGRLSKKSKSKSQ

SEQ ID NO: 7453 - protein, 458 aa, Papilio machaon
MVSNSVIYLLCFTISCIESARILAMFPTPSISHQVVFRPLTQELAKRGHEVIVITPDPAYPKGQAPKNLTEIDVHDISYSKFKILMERIKDVARDVIKQVEVIIDSNNAVFEEQMKTESVQEILKYKDDYFDLILVEACMRPAIGLSYVFKAPIIQVSSFGAIMDNHYIMGTPTHPLLYPSMSRDRLYNLTMWEKFTQLRKEFIAGMDSEILHTYDLKSYLDSSKNGVIYFSLGTNVKPSNLPSDKLQVIINVFSRLPYDVLWKWDDEELPGRTKNIKISKWLPQSDLLRHPSIKLFVTQGGLQSTDEAITAGVPVIGIPMLGDQWFNAEKYVHFNIGHKLDIDTLTEEQFDNAIKSILNNNSYRENIVRLRSIMQDQPQSPLDRAVWWTEHVLRHGGARHLRGPAANISWAQYLELELVLTLAAILISSLIILFIVAKLIWNVLKVQLSAVIKVKKS

SEQ ID NO: 7454 - protein, 356 aa, Aethina tumida
MILKFSDSARILGIFQMPSFSHQCVFQPIWKELALRGHEVTVVTSHPLGKLMYINPIFVSLGSRFNAPVIAISSMGAYIGTHFAMGNPHHPAMYSEMFLPYHGKLTFTERWYSTFYYLWDLKNELDRAKNGVIYFSLGSNVQSVNMPERFRNVLIETFAELPYTVLWKWESDHLPNQPKNVITRKWLSQQDVLAHPNIKAFITQCGLQSLEESFHAGVPIIGVPFIADQEMNIRRLNEYGIGIGVDYLTVTKEELKAAIVEVAGNDKYRKKTREFNKLLNDHPQTSLERVVWWTEYVIRHNGTTHLRSPSVDINWCHFLLLDVIGVTLAIVIAAVYLILKILCLLCRSKTPKLKTN

SEQ ID NO: 7455 - protein, 517 aa, Bombus impatiens
MNFQFLLSVISCVIFSVNGARILVLFPHQAKSHYIVFEPLLKKLAENGHQVVSVNFFPQKTPLPNFTDIDISSSLPSLVGTKTVSNSFKTFKWEVLRGVLSHGAPSCDPVLNHPALKKLLRSKEKFDVCIIELFATDCFLGIVHTLNIPLAVGATSSAILPWTNEIMRNPEIPSYIPNWMNGLTDQMNFFERSINFVDFLVTKSAYRYLSDKPGHEIAKRHFGDDLPDFDTLRSRISLVLTNGHAAVSTPRALAPGFKELGGIHILSSNPPSLPADLQNFLDSHSKNGVIYFSLGSQIDSSTMSEQALAAFYRAFEQVPQQILWKCTGGKMPTLPKNVKCIEWAPQLSILCHPNVRLFITHGGLLGAQEAVYCGVPILGIPLFGDQHLNMAYFVKKGLALKLDYRQLSYAPVSNALNELLVNKSYTDMARKASSQFKDRPIPPLDEGVYWIEYLLRHGPNSLKTAAVELTWYQYLLLDVISTMVISIIFTIWIVYKLFKLLFCRRKMVSVDINKKQS

SEQ ID NO: 7456 - protein, 518 aa, Habropoda laboriosa
MNFLFALTLIACVIFGVDGARILVVFPHQARSHYNVYEPLLKRLAEKGHQVVSVSHFPQKTPLANLTDVDVSSSLPSLIGTMTMSQSDKVYKWLKLKSVLENRGSVICDPVLSHPGLRKIVQSREKFDVYIVEIFVSDCFLSIAHVLEIPIVIGTITSVTVPWANDVLRNPEIPSYIPNWFSSYTDRMNFFERFGNSVDFFVTKLAYRYLSDNPSYEIAKKHFGNDLPDFDTLRSKISLILTNGHPVISTPRAVAPGFKELGGIHIPPSGPQPLPKHLQDFLDAQGNDGVIYFSLGSQINSSTMSNQVFAAFYKAFEQVPQQILWKCSEEKMPRLAKNVKCIEWAPQLSILCHPNVRLFITHGGLLGTQEAVYCGVPILGIPLFGDQHLNMAYFVKKGLARQLNYQQLSYEPLSNALNELLTNKSYTDTARKASLQFRDRPIPPLDEGVYWVEYLIRHGPGSLKIAAADLTWYQYLLLDVILVTIVSILLATWSVYKLCKLVFRRKNVASVSSNKKRM

SEQ ID NO: 7457 - protein, 527 aa, Papilio machaon
MRGLIFLSVLSLVVFSHVNCARILGLFPHPGKSHQMVFEPLLKTLAERGHHVTTVSFFPLKNPPENYTDISLENISEVLLESLDLSLFESNGVISKIPVLRRVLGLMFEFQPLAHFALHVCENMIQWEPLANVLKKEYDVILLENFNSDCMLGLLHIYGNTAPKIALSSSNLMPWSAERIGLIDNPSYVPMVSTGFTSRMTYTERLENSFLSVFYKLWFYKSVQVKEQSLIEKRFSKAVPDLRDLSRNYTLTLVNTFHALNGVRPLLPALVEVGGMHLDHTLKPLTPYIEKFLNESEHGVILLSFGSLIKTSTIPKYKEDMIVNALAKLKQRVIWKFEGSGEEGTLTGNILRVKWLPQYELLQNKKVVAFIAHGGLLGMTEAISAGKPMVVVPFFGDQPANAAAAAAAGFATVVPYIELTEEKLTKALEFVLSAETRLNARRVSSIWRDRQADPLETAVYWTERVIRWGHHAQLHSPARDMPLYQIALLDVIATLVIAILIILAISWYILSKVFRLLFGRESKLKMH

SEQ ID NO: 7458 - protein, 512 aa, Helicoverpa armigera
MSISLVLFLLSFSYNDAARILAVFPVASISHQVVFRPLTQELARRGHEVTVITTDPAFPKGGAPANLTEIDVHFTYEYMRKFYKLSSSAEGDVVSQMKFAFEMMIEAFEVQMKSEGVQKILKEGKFDLLLVEACVRQALVLSHVFQVPVIQVASAGPTNFNLDSFGTAWHPLLYPLPFSQRVYNLTNWEKLTEIWKFYQLEDIFNKCGEKEDEANRRVFGPNVPSVAELGNNVEMLFLNVHPFWEDNRPVPPSVIYTGGLHQKPAQELPKDLKSYLDSSKNGVIYISFGTNVQPSLLPPEKVQILVKVFSELPYDVLWKWDKDELPGRTSNIKISKWLPQADLLRHPKIKFFITQGGLQSTDEAITAGVPLIGFPMLGDQWYNAEKYVHHKIGKQLDLATVTEEQFKNAINTVIEDKSYRQNMKNLRDLMHDQPMTPLERGVWWTEHVLRHGGARHLRSPAANMSWTQFLELELILTVLATALSCLLLLLVLINCSWKHFTSTPKPKKKKKQ

SEQ ID NO: 7459 - protein, 513 aa, Leptinotarsa decemlineata
MWLLKLINLALLCFGLILESDSAKILGIFFVPSISHQIAYRPIWRELSIRGHNVTVISPNILNDSSLTNLTEIDVSFAYDILGKFDLQKNAAKENFLVKNFITIHNMMFSVMHAILEYGAVQDLIHSDEEFDLILVESLHPLVFSFGARFKAPIIAVSSIEVFVYIYDIFANPTHPISNPDMMMYFEREPSFIERIRSLTHNVVSRLCYYWWILPQSDVLARMYFGEDMPDLEKIISNTSLLLINRNPIMHSPRPNVPTIIEIGQMHIREKKNLPEDLQTYLDSSEKGVVYFSLGSNIKSANLSGGLQEIIKQALSELPFDIIWKWETEQLPGKPDNVLIREWLPQQDILGHPNVKVFVTQGGLQSLEEAVVNGVPMVGIPFWMDQFNNVKILADKEMGIGLNYNTMTKDELRKAIFEVATNSKFKKQLEKAKNILLDQPVTGLNKAIWWIEYVLRHKETTHLRTPSADMSFFQYFMVDVFAFLLLSICIFVYLLKMAFRMIVGSKNNKIKTN

SEQ ID NO: 7460 - protein, 518 aa, Trichoplusia ni
MRIYLYLLTCYVLFVNSNEAAKILGVFPTPSISHQVVFRPLMLELAKRGHDVTVITTDPIFPKGGTPSNFTEIDLHEKSYRIWRETFLKLSSGSKDDLVAQTESLKMIQEIFEVQINDEQVQRLLRENKHFDLLILEACSRPALIYSHIYKAPVILMSSFGAIFDNFAVIGAPSHPLLYPDVLRQKLYNLTMWEKITELRTNYKISSIYAQNVVQEDKLLRSLFGPDTPSLTDLANNVDMLFLNVYPVFDGIRPVPPTVVYTGGLHQKPEKELPDDLKTYLDSSKNGVIYISFGTNVDPTLLPPARVQVLVKAFSQLPYDVLWKWNGDELPGRTANIRISKWLPQSDLLKHPKIKVFVTQGGLQSTDEAITAGVPLIGVPMLGDQWYNVEKYVYHKIGVGLDLEHLTVEKFKNTIIEVISNDSYRRNIIKLRGLMRDEVQTPLERAVWWTEYVLRHGGAKHLRSPAAIISWAEYLELELVLTIMAGLLLSLVIFIAIVISLYKYVLRHYVAAVKIKST

SEQ ID NO: 7461 - protein, 530 aa, Cavia porcellus
MAPARLPAPLSLCLCLLLASGFAQAGRLLVVPADGSHWFTMRSVVEKLVQRGHEVVVVMSDVSWQLGQSLNFTVKNYVPSFTLEDLNREFKVFVDNAWKFGSQSVFSAVIHPSSRSFDLLFSQCRSLFNNKELVAYLKEASFDAVFLDPFDPCGLIVAKYFLLPSVIFGRGALCSHIEKGAQCPSPPSYVPRIFLRFSSTMTFKQRIQNYISYLEEMVFCPYFLKKTLEIASEILQTPVTTYDLISHTSIWLLRTDFVFDFPRPVMPNMVFVGGINCHEGKPLSEEFEAYVNASGEHGVVVFSLGSMVSEIPEKKAMAIAEGLGKIPQTVLWRYTGTPPSNLAKNTILVKWLPQNDLLGHPKTRAFITHAGSHGVYEGICNGVPMVMMPLFGDQMDNAKRMETRGAGVTLNVLEMTSDDIADALKKVIYDKSYKDNIMRLSSLHKDRPIEPLDLAVFWVEFVMRHKGAPHLRPAAHDLTWYQYHSLDVIGFLLGIVLLVAFISFKCCAYGFRKCFGKKEQRKKTQKSKTH

SEQ ID NO: 7462 - protein, 528 aa, Papilio xuthus
MRIYIFLLILAAIASHDAGDCARILGLFPHIGKSHFMVFEPLLRALAERGHHVTTVSFFPLKNPPANYTDVVLEGAVQDGLSSMDLSMFEVSNPLMKVPLLNTILKNIFEMGMTAPLAVSTCESIIRQSSVIEALKQKYDVLIVEQFNSDCMLGLTHVFGIEAPIVGISSCGIMPWTYARIGLHDNPSYIPLLTTPYTSKMTFIQRLDSFISKLYVNDLYHIIQRKERAIIEKHFRVEIPDLDEIGKNKMSVFLVNTFHTLNGVRPTLPAVIEVGGMHLDHSRKILPSYIEKFLNESEHGVILLSFGSLIKTSTIPKYKEDMIVNALGKLKQRVIWKFEGSGEEGTLTGNILRVKWLPQYELLKHKKIVAFITHSGLLGMTEAVSAGKPMVAVPFFGDQPANAAAAAEAGFATIVPYVDITEERLTKALQFVLSPETQLNARRVSSIWRDRQADPLETAVYWTERVIRWGHHAQLHSPARDMPLYQIALLDVIATLAVAIFIFLAILWYMLSKVFRLLFGRESKLKMQ

SEQ ID NO: 7463 - protein, 403 aa, Papilio machaon
MMDDEEVQDLWKTKMKFDVAVVEQFNGDCALGLAYILNTPVIALTSHLLMPYHYDRYGISYNPSYIPFLLLEGSTESTLMQRLAHTISHIYMKFIYQYLTQRYEYKIISKYVNNMPPLEELGRNIKFLLLYNNMMLTGSNILPANVIEVGGYHVAKPQPLRDDLLKFIEESEHGVIYISFGSMLRTASIPKDKMQAILTALAELPQRVVWKWEAKSLPGKPKNIFVSKWLPQNDLLAHPNVTAFYSHCGMLGTTEALYHGVPLVGMPMFADQFRNAAAVEESGFGVTIKLENLTKDNLLKKFKTVLDPMFQANVKLLSKAWHDRPKSAMDTAIHWTEFAAKYPTLTFRSPAADVPLYQYLCLDIIFILSIIPITVICVVAIIYKTYFKSKSKQKSIKKKDKNM

SEQ ID NO: 7464 - protein, 525 aa, Polistes dominula
MNVLTYIIVCLTMCLTLCQSYRILGIFTFHGKSHFIMFEALMKGLAKKGHQVDVISTFPLKKPVENYTDLVSIPVKLKLVNNVSYEFMKMALSGAMAVNAVASIGGNDLCEYLELPEIQKIIKNPPQNPPYDAVLIEIFGASCFGIFGNILNVPVIGVSSSALYPWANPYIANPENLAFVRNNLLSYVKEMNFGQRVYNTLHTLFNKMYFNYKTTKYQDELIKKHVGPNMPSVREVETNISLILVNTYFSLNGIKPKTPALIEVGGLHVQDDDDTELSPELKKWADECDKDGFIYFSFGSMVNIETFPKHILDIFYKSFEYISPVKILMKIPNPKNLPPGLPNNVRIAPWLPQLKILKHPNIRAFITHGGLMGTQEAIACGVPMIGIPLFADQFTNIESYVEKNIAIKLDYETMTQNDMNDALHKIVYNSTYRKTARIIADKFIDRPLKPIDTANYWIEYVIKHGYNSLHSPALNLYWWQVALLDVYVFIFVVTLVIIYLIVHLTLLLLNVFSSNSKVTHKKKVT

SEQ ID NO: 7465 - protein, 201 aa, Stomoxys calcitrans
KFENDELPNKPENVILRKWFPQPSVLAHPNVKLFISHGGFLSTTETIYHGKPILGIPFFGDQFMNVKNAVKAGYALSFKVADITKDSLKSAIMELWTNPRYAQAVQQKSKYFRDTPLTPLETATYWMEYVIRHKGCAHMRNAGLDLNFIQYHNIDVFVILAAAVVLLVTLLVAILRKLKHLLFGNSKRKGNSKHSKKSKLN

SEQ ID NO: 7466 - protein, 290 aa, Danio rerio
MCETMGKVDICLIRTYWDFEYPRPFPPNFKFVGGLHCKPAKPLSKELEEFVQSSGDHGVVVFSLGSMIKNLTSERANTIAAALGQIPQKVVWRYSGKTPETLAPNTKIYDWIPQNDLLGHPKTKAFITHGGTNGLYEAIYHGVPMVGLPLFGDQPDNLLHIKTKGAAVVLDIHTMGSKDLVDALKAVVNNPSYKESIMRLSRIHHDQPMKPLDQAVYWIEFVMRNKGAKHLRVQAHELSWYQYHCLDVAAFLLSITALITFLWVKACCFLFRRCVRKTRPERKRQKNKKE

SEQ ID NO: 7467 - protein, 528 aa, Amyelois transitella
MRAVLLAALLAAAGPARAARVLGLFPHTGKSHQMVFEPLLRRLAERGHHVTVASFFPLADPPENYTDVSLQGIAPLGLETIDLALFENQNWLLTTLGVQKIVNQINEFQPLAGMALDVCSKLVSWSPLEEALRKEYDVVLVENFNSDCMLGLMHIYGLQAPTVALLSSGLMQWSAQRVGVNDNPAYVPIVSSSFTSRMTFLERLENTVLNVYYKLWYRHFIQVKEQELIEKHFGRKIPDLESLSKNISLMLVNVFHSLNGVKPLLPGVVEVGGMHLDHSEKPIPEYMERFLNESEHGVVLFSFGSLIKTATLPPHKERLIVRALARLRQRVIWKYEDSGELGTRQGNILKVRWIPQYQLLRHKKVVAFVGHGGLLGMTEAVAAGKPMVVVPFFGDQPQNAAAAAAAGMATTVSYADLTEESFTEALHTVLSAEVRLNARRLSSMWHDRAAPPLDTAVFRTEHAARWGPRDPLHAAARDLGYIQIALLDVAAAVLLAICVLVLLVILIVSIILRILKRLFSSKRKEKLH

SEQ ID NO: 7468 - protein, 524 aa, Habropoda laboriosa
MKLLSIVLLCTILSVCHGYRILGVFPFNGKSHFMMFEQLMKALAKRGHQVDVISSFPLKKPYPNYNDTIVLKAPREFMNNMTYEDVTIVFKDSPAFVVATLAGNAVCEHLNDPGIQDLIHNPPKNPPYDVIVMEIFGAHCFAILGEVLKVPVIGASSSALYPWTYDFIGNPGNYAFAPSILLSYPQNMNFWQRTYNFVYTLYNKWEFMSASSEQTELLRKYVSPDAPSVRELERKIAMILVNSHMSMNGIKESTPAFVEVGGLHVQEEGVEISPVTIILLEKWMNESTNGFIYFSFGSMVKIESFPSRHLEIFYNSLEKIAPVRVLMKIANPQELPRDLPKNVLALPWIPQVKVLKHPNVKAFITHGGLMGTQEAIHYGVPLIGIPLFADQFINIDTYVRNNIAVGLDLKTLTQEKMDEALNAVLNDPKYRDTMRKISKRFLDRPLSPADTAVYWVEYIIRHGANALRSPAMDLTWWQVELLDVCAFLLIVVLGVLYLLATVVQFMFYLTNSSQHSVPRKKKAA

SEQ ID NO: 7469 - protein, 524 aa, Chilo suppressalis
MSNIPQTSVLLLLLLSVCGNDAARILAVYPTPSISHQVVFRPLTLELLKRGHELVVITTDPIFPNGKAPANLTEIDFHDKSYTLWREHFLKSIVNQGTKEDSMEKGLLMYYTMLEIFKEQITSKEVQTILKDKSNKFDLLLLEAYFIPALALTHFIKAPVIQISSLGSTVENLAIVGASTHPLLFPTMVHQKIYNQTMWDKLRELIVYCYYTFFVGEVSTKTERFLKETFGPDLPDTSQLRNNVDLVFLNVHPIWEMNRPMPPNVIYTGGLHQNPQKELPQDLKEYLDLSENGVIYISFGTNVNTSLLIPEKVQIMIDVLSTLSYDVLWKWNTDELPGRSKNIKISKWLPQSDLLRHPKIKLFITQGGLQSTDETITAGVPIIGMPILGDQWYNVEQCVHHKVGVYVDMGTMTEEIFKQALDEVLNNDSYRRNMQRLRALMRDQPQTPLERAVWWTEYVLRNGGARHLRSPSANITWSQYFELELVFYISIVIITLLVLLGYISLKVLKLIKNSLFAKAKVKFS

SEQ ID NO: 7470 - protein, 398 aa, Apis cerana
MFEALCKGLANKGHQIDMISHFPLKKSIPNYTDIIDLSGTRKPIVSSFTIDFAKILDRSLVYYMATDFGTSLCYLMGNEKMQKFIKNPPNDPPYDLIITEYFASPCYLGFGHLLNAPVAIATSFLEMPYIDNFMGNPLNYGFFSGHYNDYPVVDTFLDRLWNFIVNYKEEQKFYYYTSDQTDIMRKYLGLPNLPDIRELERNVSLAIVNSHHSYHGIRAVTPAIVEVGGIHIVESDQKVNPELKKWLDSANHGLVYFSMGSILAIEEMSKEIILTFYQSFAKISPIKVLIRCANSTKLPPGLPSNAMTFPWIPQIAVLRHKNTRVFITHGGFGGTQEAIYYGIPMIGIPVFSDQKKNIYALVQKNMAVAVDIDNINEDVINTALDAVLHDPKYRITTE

SEQ ID NO: 7471 - protein, 520 aa, Ostrinia furnacalis
MDKAQIILCVLGVICCADAYKILVVFPFPIRSLNNLGEGYVRHLLKAGHEVKFITAFPLKNEKNEKLRQIDISSNHQLMVSGDSTFSIKSVMDGQIPMNDVKMMQEFGLYSSIMMFEHENVKKFLEDTSQQFDAVIVDLYETEIYSGLSALYNCPMIWSYSMGAHWLVLRLIDEPTNPAYSADYLSSNVLPFTFKQRLEELWAQILWTWTKWTSTMPKEKEAFTKYFKPLLENRGHTLPDYDQLIYNASLIFGNEHHAFGNIPRTPQNFKFIGGFHIESPAKPLPKDLQTLMDNSKDGVIYFSMGSTWNSKDLPESVVEGLVKMFGELKQTVIWKFEADLPNLPKNLHITKWAPQPSILAHPNCLFFITHGGHLSSTEAIHFGVPIIGVPIFFDQFININKALSKGYALKVHLNYDLPRNLKTAIQTMLSDSNYRKQAKELSSIYHHRPVPPGQEMVHWVTHVIRTGGAPHLRSPALNMAFYQKMYLDFAALVAVIVVAVVLVVKKLCGGRKAVPKEKRN

SEQ ID NO: 7472 - protein, 524 aa, Trichoplusia ni
MIRAKVLIYICLYTAVTYVDSARILGVFSMPSISHQVVFRALTFELAKRGHELVVFTPNPVSPAEGIPNNITEIDTGQSYQILKELMERALNKKVLQRGVIMNLRSMNGEALSRAILKIVSSQFDLPEVRKVIEDKTQKFDLVIVEPILSVPLIVGKIFNAPVILLSSFYGSSDIFEIMGAFSWHPMYYPSFYRTKYKDLTLLEKIGAVYLEWRLIKSTLETDEKQNEFLKTRFGPNAPTVRELRNNVQMLFLNAHPIMGNNRPVPPSVVYLGGLHLKPPKPLPQDLQTYLDASIRGVIYVSFGTNVRPSNMDQDFLDAFLQAFESLPYDVLWKFDGDNLERIPKNLKIQKWFPQRDLLLHHNVKAFVTQGGLQSSDEAIDAGVPLIGIPMLADQWYNVNKYVELGIGVQINALTMTADDLTQAVEKIVSDTSYRQNIRRVRAIINDQPESPLERALWWTEHVLKHGGNHLRAPSANTTWSEHLMLDVVLLVLSIILVTGFLLIYASFKIWNLLKYKLEKVKLH

SEQ ID NO: 7473 - protein, 530 aa, Cryptotermes secundus
MAGKLYILVALVVALLTTSESAHILGVFPIPAKSHNIVFSALTRELARRGHQVTVISPFREKNPIPNLTEIEVKLDLTDDFSGNLFNLRHKGTLELSRSQWKSAPAFCVSIFQHPQVQTFIHSKHHHFDAIIVETFANECVLGFAHKFQALIIQICQFGGTHWMGDWLGNPNPYAYIPDAFLDYSSHMSFGERLVNTLTGVYWRTGQEFYSIPRQEAVMRQYFNDTDDIPPLADIVRNTSLLLLNNHFSLNYPRPLVPNMIEVGGMHVQTAKKLPEDLQIYLDEAPNGVIYFSMGSLLQGSQMPDSVRKAFVEAFSKLEQKVLWKWETDSLPGQPNNVKLGKWLPQADILGEVPVPCAAHPNVRLFITHGGLLSKQEAINRGVPLLGIPVYGDQYLNVRKAESLGYGIRLEFDNITAESVLWAIQTALQPRYRENAQRLSRIYRDQPLTPLEQAAFWTEYVIRHKGAPHMRSAALDLTWYQYFLLDVIAVLALAVGVFLLLALLISRAIFRKLCGATPKDKNARHKKKIN

SEQ ID NO: 7474 - protein, 498 aa, Aethina tumida
MKNIFYISCISLLNIHLVFCSRILFVAPIPSYSHQIFFRKIWLKLAERGHDLTVLSTDYMENAPKNVRQIDWHFTYQLRHNKYNISQVYLDNEDDIAKVISVYITMLNEISDRELSQPDVQQLLKNRDEKFDLLIAEFHHPLVFAFSSYFNCPYIGISSANIDNSFHELLGNPAHPLLYPSIFSPLDGQMTFRTKVDILTFWIKSRFNKYSHGDPYHDELARKHFGSNLPPMLDIIRNVSLVLINTHVVFDDRPLLPGLIRIGGGTHLEPAKALPHNIQEFLDDAPEGAIYFSLGTNVKSTCLKPDTLNAFIEAFRELPFKVLWRFEDDLKNVSTNVKIFKWLPQSDVLRHKNVKAFITQGGLQSIDESIFSYVPMIVIPFVSDQKLNARNIKRKGLGVYLDKSNLDKECLKQAILEVISNQTYKTNVKNIANYIEDQPMSGLDTAIWWIEYVIRHKGTKHLWNFDNILPLYEYLMLDVIFYMIFIKLTPLYLAYILG

SEQ ID NO: 7475 - protein, 454 aa, Rattus norvegicus
MGETFSIEKSHPGNRIMHYRVDLCPQKVKLNKLQFEHHTIVKIHRHFGDLCNHLLSRKDIMEFLKNANFDLVLFESVDYCSSLIVEKLGKQFVLFLAFQLGFMDFELQRVPLSYVPVYGSGLTDQMDFWGRVKNFLMFFDLSRKQREILSQYDSTIQEHFAEGSRPVLSDLLLKAELWFVNCDFAFEFARPLFPNIVYVGGLLDKPVQSIPQDLENFITQFGDSGFVLVALGTVATKFQTKEIIKEMNNAFAHLPQGVIWACKDSHWPKDVTLAPNVKIMDWLPQTDLLAHPSIRLFVTHGGMNSVNEAIQHGVPMVGILFFSDQPENMIRVEAKTIGVSIQIQTLKAETFARTMKEVIEDKRYKSAAMASKIIRHSHPLTPSQRLEGWIDHILQTGGAAHLKPYAFQQPWHEQYLLDVFLFLLGLTLGTVWLCVKVLGAVMRYLSGARKAKQT

SEQ ID NO: 7476 - protein, 518 aa, Bombyx mori
MNFQTIHLLVLSALACDAYKILLVFPFPSKSHAILGEGYVRNLLKAGHEVTYITPYPRDPAPNLRIIQVSQHDFEEKINSTLTIEKLIDYSFTVMEMFNITKSFIYTANDTVANTEVQQLMLDPQTHFDVVVAEWMITEIFSGFSVIFNCPLIWSSSMEPHSWILPLIDEIPHPAYSSNILGLFEPPYNFVQRAINTSLEIALKVIKWLVTLIEEQIYKEGFAAAFKAKGLIQPSLEELRYSAALVLGNSHISSGAPLKLPQNYKAIGGYHIDEQSKPLPKDFKNILDNSKHGVIYFSLGSMAPSKSMPAAIKNGLFEMFRSLKYTVIWKFEDEFQNVPDNVHIVKWAPQQSILAHPNCILFITHGGLLSTTETLHYGVPIIGMPMFGDQVMNIKKAVHKGFGLEVKLNFDTPKNLKAAINEVLSNQKYRDRVKELSLIYHDRPVSPGAELVHWVEHVVKTKGALHLRSQALHVPLYQKLLLDIIFVSLLLFLGFVFFIKYMVTRCLKKKIDIRKKTL

SEQ ID NO: 7477 - protein, 526 aa, Poecilia reticulata
MKLHITFFVLLLLSAANGGKILVWHTDGSHWINMKPVLETLVDRGHQVTVLVPSTSMFMNSSEPSRFRYEPFNVSVSMEFKKKFIEEFLLFSIYEVNHMSYLQIYNKFIGFIRTNMDYFLKFLHRVVKSETIMKKLKKGNYDVLFADPIYPGSDLAADMLGIPLVFSLRFSLAHNWERMCGQLPAPPSFVPGIMSKLTDKMDFSERLWNVLFYALQDVVMRNLMWRELDKYYSEVKGTPTSACELMGKADIWLMRTYWDFDFPRPLLPNFKFVGGIHCKPAKPLPEEMEKFVQSSGDAGIVVFSLGSMVKNLTTEKANMIASALAQLPQKVLWRYSGEKPKGLGSNTRIYDWIPQNDLLGHPKTKAFITHGGTNGIYEAIYHGVPMVGIPMFGDQPDNMVHMEAKGAAVTAKLKFMTNESLRDAVNTVINDKSYKENVMRLSRIHHDRPMSPRDEAVFWIEFTMRNKGAKHLRVQAHKLTWYQYHSLDVLAFLLIIDLLLIFILFKSCSFCFKRCCSRKKTKRKAE

SEQ ID NO: 7478 - protein, 538 aa, Brugia malayi
MYHAEWYLASLIIIFHASQNDSYKILVYNPRFGKSHTKFLGSIADTLVNAGHNVTEFAPVLFEFSDSTGSKLAKTVKIDADPEISKIMNVEIFAQDAWKRNQQSIFSLISVMKRMSDALLKNCEFQLKQEKIMQELKSEKFDLAIFEFNQCFAGIIELLRIPAHIVVSPTALFEYAIECFGIPNIPSYIPSLLTQYTDKMTYLQRLKNLIITILTTKLLDNHTIRCQALFRRLYGDQFIDLKEKLAQVTYVLTNTDPLFHISRPTIHKMLELGGLALPKPQPLSKEWIAVMNKRKAVVLVSFGTVTLSCWMPNETKQALLDAFDSFPNVTFIWKYEKDEHLIAEGRPNVITSKWLPQSDLLAHKNLIAFLTHGGMNSITETLNRGKPIVVVPLFGDQMQNAVLVQRLGLGIKLSLSELAIKEKIKNAIYNIIYDKSYAQKVERLSKMMAKKPNQAEEQLIKHVEFAAEFGQIANFDPYGRKMSFVSYYMLDIIIPFIILIFFIITIICYLIIRLFRKLFHKAVICNNNNSIITKVKKN

SEQ ID NO: 7479 - protein, 527 aa, Zootermopsis nevadensis
MKREFQGQMAKSALWCLCLPVLLFLLLVPQDVSCARFLVIIPTSVKSHFLMLEKYMKALADRGHELVVVSRFPQIQPISNYVDIVLEGSLNGSNPKYTLSIEQALFIKNPVVNAMSLAKYGALNCGAVLNDPSVKQLINSDEKFDVVVNDCFHTDCFLPFAYKFGAISICASTSVLMPWANDRMGNPDNPSYIPNLFTSYSERMNFVERVINAVTTVLHKVAYHFISDCPSQLLARKFFGEDTPDLADLARNISLLLVNSHFSVNAPRPLVPGVVEIGGMHIPKPKPLPQPLQDYLDGARHGVIYFSFGSLLQAKSFPDDKRFLQAFSELPQRVLWKWEGDTLPGQPENVQIEKWCPQSDILRHPNVLAFVSHGGLLGTLEAAYNGVPVVGIPFYGDQRSNVAHLKARGMAIQLQYENITKQSVLEALRTVLDQPSYIENARRTARIFRDRPQSALDTAIFWTEYVMRHGGAPHLRSAAVELAWYQYLLLDVIAFTLGTILIFILAVRKFFRVLCSSKNVLVKKKQE

SEQ ID NO: 7480 - protein, 345 aa, Homo sapiens
RWTAPLRSAFSLLTSSSNGIFDLFFSNCRSLFKDKKLVEYLKESCFDAVFLDPFDACGLIVAKYFSLPSVVFARGIFCHYLEEGAQCPAPLSYVPRLLLGFSDAMTFKERVWNHIMHLEEHLFCPYFFKNVLEIASEILQTPVTAYDLYSHTSIWLLRTDFVLEYPKPVMPNMIFIGGINCHQGKPVPMEFEAYINASGEHGIVVFSLGSMVSEIPEKKAMAIADALGKIPQTVLWRYTGTRPSNLANNTILVKWLPQNDLLGHPMTRAFITHAGSHGVYESICNGVPMVMMPLFGDQMDNAKRMETKGAGVTLNVLEMTSEDLENALKAVINDKRKKQQSGRQM

SEQ ID NO: 7481 - protein, 530 aa, Mus musculus
MAPAVFPASLPLRVCLLLAFGLAQAGRLLVVPMDGSHWFSMKMVVEKLSHRGHEVVVVIPEVSWHLGKSQNFTVKTYSVSYTLEDLSHHFNFFAHKQWENREVGMFSLLKHSGKGFFQVLFSHCRSLFNDKKLVEYLKQRSFDAVFLDPFDVCGLTIAKYFSLPSVVFSGGIFCHYLDEGAQCPSPPSYVPRILSKFADTMTFKERVWNYFSYMKERAFCPYFFKTAIEIASEVLQTPVTMTDLFSSVSIWMFRTDFVLEFPRPVMPNMVYIGGINCHPGKPLSKEFEAYVNASGEHGIVVFSLGSMVSEIPEKKAMEIAEALGRIPQTVLWRYTGTRPSNLAKNTILVKWLPQNDLLGHPKTRAFITHSGSHGIYEGICNGVPMVMMPLFGDQMDNAKRMETRGAGVTLNVLEMTADDLENALKTVINNKSYKENIMRLSSLHKDRPIEPLDLAVFWVEYVMRHKGAPHLRPAAHDLTWYQYHSLDVIGFLLAIVLTVVFIVFKCCAYGCRKCFGGKGRVKKSHKSKTH

SEQ ID NO: 7482 - protein, 533 aa, Propithecus coquereli
MATGLQFLPMGLLGLLLFLNGGPCAEGEKVLVVPMDGSHWLSMREVVRELHARGHQAVVLAPEVNMHIKEEDFFTVKTYGFPYSKYDFENLLKEHIQIAFETQHFLNMFFKTMAILKRSSVFLYKSCADLMHNKTLLRQLNASSFDVVLTDPVYPCGAMLAKYLSIPTVFFLRFIPCHLDFEGTQCPNPSSYIPRSLTRNSDHMTFVERVKNMLYPLALFYICHVSYFPYASLASEVLQREVSLVDILSHASVWLFRNDFVLDYPRPIMPNMVFIGGINCVNRKPLSQEFEAYVNASGEHGIVVFSLGSMVSDIPEKKAMDIADALGKIPQTVLWRYTGTRPSNLANNTILVKWLPQNDLLGHPKTRAFITHSGSHGIYEGICNGVPMVMMPLFGDQMDNAKRMETRGAGVTLNVLEMTSADLENALKTVINDKSYKENIMRLSSLHKDRPVEPLDLAVFWVEFVMRHKGAPHLRPAAHDLTWYQYHSLDVIGFLLAVVLAVTFVTFKCCAYGFRKCFGRKGHVKKAHKSKVH

SEQ ID NO: 7483 - protein, 339 aa, Oryctes borbonicus
MTADLVVNRNTWSMMRLVFAIAGPSLCKGVLETETLKRLKQTTKKYDILITEFFATDCALGFSYLFGIPSVALTTSIALPWTSSFIGFPDNPSYIPNYFTPFRPSMTLSERVINTGVYVITKMGYDIFSMTESNIHAKEFFGSNLPDLEELASNVSLLLVNSHFSVHMARPTVPNFIEVAGLHIKQNYNLSKYFQMALETDLKGVVYLSFGSMLLTESFPEYKLQSLFQAFGKVPYKILWKATREKFAPSLDIPSNIQFESWMPQLEILCHPNVKVFVSHGGMMGTLEAIHCGVPVLGIPMFADQKLNIRTSAARGFATYVSYENITEESISEALNLLL

SEQ ID NO: 7484 - protein, 466 aa, Folsomia candida
MNHDKVKDLVIPELAEMLEYLISKFDINYRIQGLQPSSLFTLDPVSYAACQAVHRSPTFQAWVATIPSIDLIYSDTNPECAYGLAAKFGAKHAIFQTIPLSSKQFEVLGISSEAGSIPPWEMSDIPPLSFYKRTVGTFLPFIGRVQQLSLYRFLYKSLFVETLGLETPPELYDMEADISLLLINGNYLEDYARSLPPFVVKVPGMHIRENLEAEQLDPSLEAFISSSSDDTDGFIYISFGTVVNASNLPKSFLDIFFRSIEAFPTLQFIWRWKGPIPSPHPKNLLFTPWVNQQKLLSHGKIRGFITQAGRPSMQEAFYHAVPTIAFPILGDQDFNAAKYEYLGTAVCMDIATVTQPQLMIAINRTVTDTAWIGRVNRMASLARDVPITPVKMALWWTEFILRHTPEEINFLKPLGQQSDWWKRRELDVWAFVILFSVVVSLVIFRLTRPLRQSLWKMVKSLKSKLD

SEQ ID NO: 7485 - protein, 410 aa, Alloactinosynnema album
MRVLLSGYDSRGGIEPLVALAVRVRELGAEVRVCAPPDFADRFAAVDVPLVPVGQSLRAMVNAPTPPTAGGLPDRAAAVVAAQFDKVTEAARGCDVLVATGVMPAVAAARSVAEKLGIHYVYASFQQLTLPSPHHPPLAYPGHPFPEGETDNRVLWDHDARSIQALFGGALNTHRAAHGLAPVDNVRDYVIGDRPWLATDAALDPWLTPADLDVVQTGAWILPDVRPLPADLEAFLEAGEPPVYVGFGSMPMRGSDVALSAIEAVRAQGRRVLVSRGWADLGLIDDQDDCFAVGEVNHQALFSRVAAVVHHGGAGTTTTATRAGAPQVVVPQMGDQPYWASRVADLGIGAAHDGPTFTAESLSAALRTALAPETRTQAAAVAGWIGTDGATVAATLLLDVISRERPPVPA

SEQ ID NO: 7486 - protein, 427 aa, Thalassospira sp.
MHILLMTYGTRGDIQPFIALAYGLQQTGHMVTLAAPGRFQSLVQQHGLAFAPLTDALINLTSKPQFANASNPGTGFLKKISSILKLRAQGRDLQGALLDDIFETINRLRPDKIVFHPKAFGALAIADHFAIPAILAQLIPALIPTRAYPHIGFPNMADCRKYNLLTGKLVKGLVNLSLRNSLRDWASKRHKAIPYQKFDILKSQKFGAITILNAYSNAIIARPNDWPKKAAVTGYWFVNDALYEPSTEMTSFIKNSQKLIYIGFGSMPAANPQKTAQMLIDAVKQANAQAIIATGWGGIASDVDWPSNIYAVREVPHEWMFKHVKTAIHHGGAGTCAAALRAGCPSIIVPFFGDQPFWAKRLYTIGVAHQLIPSSKLDAKCLASAISDILATPQVHETAKRIAKQISHENGVATAVDLILNGTEIAA

SEQ ID NO: 7487 - protein, 605 aa, Vigna angularis
MAKENVLHRATSSSSDISVCLDTDATSAPASAGPVHRNPSYAERGTPAPTPAPAPVNGDNDLTRVRSKGSSAVALAKFLDAKVPFREKVQWIKRASVLKADGTVEIKVPGIGSSIHEHHVKCDEPHDEFWDAIHNQDIRSIKPLQIVMLIVGTRGDVQPFIAMGKRLQEDGHRVRLATHKNFEDFVLNAGLEFYPLGGDPKVLAGYMVKNKGFLPSGPSEIHIQRNQIKEIINSLLPACHSRYPDYNATFKAEAIIANPPAYGHTHVAEYLKVPLHVFFTMPWTPTSEFPHPLSRVKQPIGYRLSYQIVDALIWLGIRDLINEFRKKKLKLKPVTYLSGSYTHPFDVPHGYMWSPHLVPKPKDWGPKIDVVGFCFLDLASTFDPPKSLVDWLEEGEKPIYVGFGSLPLQEPEKMTKIIIQALEKTGQRGVINRGWGGLGSLAERKKSVYLLDNCPHDWLFPRCTAVIHHGGAGTTAAGLRAECPTTIVPFFGDQPFWGERVHARGVGPAPIPVDEFTLDRLVDAIHFMLKPEVKRRAVELANSMKNEDGVLGAVKAFYKYYPDQKSRCEEAKALAAVIKPKPIHKYFSLRGCLGCSTSSVDTHRP

SEQ ID NO: 7488 - protein, 859 aa, Aspergillus nomius
MTDMRCFAAEDGSWELPPPYEPISSSGGADSHPTRNNGAFPLSGASFPELSPTNDGRVDVHIGSRFSRNLEWLMGNQAAETPQTAGEVAPSVPCPAWDLHLNIVIQVVGSRGDVQPFVALGKELQKYGHRVRLATHSKFEQFVRTADLEFYPIGGDPVELMSYMVRNPGLIPSIKSLRAGDIQRKRASMADILDGCWRSCIEPDLYDKNPFVADAIIANPPSFAHVHCAQALGIPVHLMFTMPWTSTRAFPHPLANLKYSGNDPSLGNLVSYHFVEWLTWQGLGDLINTWRRNVLGLDPVPTSEGPNLVEALNVPFTYCWSPALIPKPKDWASHIDVCGFFFRDPPAYEPPAEIDAFLCAGPPPIYIGFGSIVLEDVEKMLSILLDAIQETGVRAIISCGWSNLERRETPNVYYIDDCPHEWLFQHVAAVVHHGGAGTTACGLRNGKPTTIVPFFGDQPFWGNMIAAVGAGPEPIPHKNLTARKLADAITYCLTPQVVAVAREIAHGMRQECGVRAAVESFHAHLPRRKMQCDLIPSEPAVWYFKTGRRTVKLSKIAAWTLKHQGRIQGKHLKRYQTKPFTIEARRWDPFTAISSASLSTLTGMADATAGIFIDPYKEYKRLRKSDRNRDASNPVIISYPPLAASETSSTTEPALISRTHASPDISDTEISPDDPAYARQMAIASATSLGIFLGRSSRGALVDLPLAAVEGMRAVPRLYGEKVRVHDPVRDWKSGAGVAWSTFSHGLYEGVTDIFVHTYHGKRKQGALGVAKGLTKGLVSLTVKTGAATVGLIAYPNQGIYRSLMSTVRKRPAKLIEEARWAEAEWTTRADGGVQINAAELCSLYDELLSTREAARRGR

SEQ ID NO: 7489 - protein, 1337 aa, Pseudocercospora fijiensis
ITSMDVPDRFKNDDDEKDVDDGTGVNEDDDNRPIFAQQSMYGIIAATRSKPDFQTSFQPDSESDSDEHSSTRRKSMDAPKRRKEKDAQKMKARSEPQKSAKKAEDISGWKDGRKSSEFKLARSFLKPMRERSDSQGQGHDPMTQSQFLPPRGEEHAETETGIEQAHTHTHAHAHTHALRSEAPVLDRKLEAMRKAEMQASMASSSSGRNRRDGRRSTDGKKRKEEQRPLPQVIADIFRFDAPEEVVAEFPCWYLQNVLLQGFMYITRKHLCFYAYLQKKTNTTIKHGRLGKLGKHSYRYRPYWFVLKADNFSYYRDSAEPYFPLGQVDLRFAISADLAEEKGTDTTYFTLTTPTRLYQYQADTPELAKEWVKQLQNVIFRSHNEGDAVKISLPMDNILDVEKSNVLEMASTIKVRVVDNEETFAIDEYFFTFFNAGDRAEEALRILRSHEPSPPDPVRPTLSPMSAGDSPSPRLSGAHRRASTKLRRGSSGSGSASFDTGRRSSSGQEGARRASKSPVSPSIQESSESFVTSSEQPDSSSHEDEEHDVDMSASQMLSDDHVFRGPTLRMPQPRRAVLGTGKHLQPESRDCSRSSSQEPMPVRLHPPSRQHTEQNDKPKPSDATAPKLIRGISTPLQYGMTVAGMVRSSSKRMGSYLSSSPKAYIDKWSDAIAGGKRQYISEEGMAPDDSIRDLEDGLDVVEHERRFREHFGLPPTEKLVSTFYCWLHKTVPLYGKIYMGTRRFCFRSLWYGTKTKLIIPYKDILNVSKQRGFRWGYPGLVLVIRGYEELFFDFPSNGLRDDCVVTVLKNLESLETAAQSTLLTQEEQQDAEDAAAENELLRDARTSSADHDFTDELRSAMSPILYDDPSASTAALKPKKSLRITCLTIGSRGDVQPYIALCKGFLAEGHKPRIATHATFKDWIERHGIEFAEVGGDPGELMRICVELGMFTPSFLYEVNTKFRGWLDDLLQSAWDACQNSDLLIESPSAMAGIHIAEALQIPYFRAFSMPWTRTRTYPHAFAVSNSKMGGAYNYMTYTLFDNIFWQTQQFQVNPWRRKTLGLPPTSYDKLQQNKVPFLYNFSPSVVTPPLDFSDWIKVTGYWFLDEGTDWTPPTELAAFIQKAREDGQKLVYIGFGSVTVSDSRQLMQQVVDAVLKADLRCILSKGWSDRFDRNKYAPEPEIPDCIYKIDAAPHDWLFRQVDAVVHHGGAGTTGASLRAGVPTIIKPFFGDQFFFANRVEDLGVGMHLKKVTANQLGKALWIATHDARMCNKARVIGEQIRSEDGVKTAIHAIYRDLEYAKSLIKKHPQRNSTDGPTEDEDDDLTEENWTFVEKEQE

SEQ ID NO: 7490 - protein, 453 aa, Melampsora larici-
SASQDTLNLGHQLSNIKPSGPLKVTCLTIGSRGDVQPYIALCKGLQRAGHVCTIATHPEFKQWIEAYGIKFASIGGNPKELMKHCVEHGILSFSFWRQGYSKFSGWLKELLHNSGEVARGSDLLIESPTTMVGAHIAESLQIPYYRAFTMPWTSTSEYPHAFAVPSQARGAMYNRMSYTLFDRLIWAGTSRFINHWRKQDLGLGPISYNALKAREHPFLYNFSEKVVTRPHDWKEWVHLTGYWVLNDSPKDVEHIPIEAQLPHGLESFIKTSREDEKKVVYIGFGSVIVPDPEEMTRMIAEAVKGADVHAVVSGGWSAKDSKVGAVGMKEQLKEFSDRIFYVDSVPHRWLFNQIDAAVHHGGAGSTGASLRGARETTIIRPFFGKFDYFRNFRAQRVEELGVGTNLHDFNAENLKEALKRATTDEAQITKAAELGVQLRSENGVNNAIQTIYR

SEQ ID NO: 7491 - protein, 859 aa, Rhizoctonia solani
MILTDDKTGSNETRSQAELSPRPSVQTNPFESASATTSPYVHASDSHESSHETAGQAPPTYSPSVSRTTRRTEMFITNGRPESTIDLVGASADSSFYPNEKVHLPEYQETIATEAAIQSDGRIQASFAPSYRLPEGYAPPIYEPALDEDGNVPAMSINIMIVGSRGDVQPYIALGQQLQEYGHTVRISTHEMFRMLVKNAGLMFFNIGGDPSQLTGYMDRNPSLIPGLDSLKNGDLGKSQQIIAEILDRCLLSCYAEDEASQGESGFAADLIISNPPTFAHIHCAEALGIPLHLSFTMPWSPTSAFPHPLVNIKQNDDAEPRMANYYSYGLVDMMTWQGLGRTINKFRTKRLGLEYLSTQSAVGITERASVPWTYCISPTIIPKPTDWMSNIDVTGYCFLNLAKGYDPPRELVEFIEAGEPPIYIGFGSIALENSENVTKSVLAAVSQAGVRAIISTSGGGLDQGMVRDAGEGVFPLTGDVPHDWLFERVCAVVHHGGAGTTAIGLKCGKPTVIVPFFGDQPWWAVQVVRRGAGPPPIHPNKLTAEALAVAIRLAISPETRDAARQIGESIRNEKGSKKAVESIHRHLPLLNMRCDLDSNRVAVWYSPTHKLRLSAFAAQVLAEAGEIDINKLELHRSREYETHIGPIDPVSGTILPGLKILNDFGRGVAKLPSQPGKGATKMLSASTLGVQNTFRGAAEGMHNLPKVYGGEVRKNKKVTGLGSGFAQGGKGFALGLYDGFSDFFMEPVRGFKRGGVLGAIGGVGIGALNLTTKPTAGFMQAVSMPIEGAVKEVKSLLYRQVGKDRIATRYAEGVNAARNASEGEREKIVRAFVERVSGSDTLTVDKKGKGKAKMVWKN

SEQ ID NO: 7492 - protein, 1191 aa, Punctularia strigosozonata
MATVRLKRRARLADKLRDVFELPGINEVVAELPCWLFSRSVLLQGFMYLTNAYLCFFAHLPAKEDQVLKSGSLYKKAQRTKRWIKHWFVLKNDVLSWYQSAADPYFPHGVADLRYALSCEPHGEKELRIRTNAKTIHLSADSARQRDDWAKAVRRAMFKSQHEGAHVKVAVPYGLIVDVDKSRAMDWTETVEVKVLEGGVAMDSYFFAYFKDIDGALEQMRDVVRTYRPAVEGGSGSGTAQIMDTTVPRAPASSPQDAPPRPSLDRAGELSPSASTSSSRMSAAFRLSSLWKPISDSLPLVRSPVSAGASLEPQAGERPDEFMHIKKGSSFVPRTAAPRSMTTDPGVHARAHAHAVPGMMGERSVSEGAAGLARSEHTYPPGTLAVEAEPAPSPTWSVGVPSWLRVPGRRAPTSPASAAVVAGSVAGVKEVYATSGGRHRSTGSAGSGAELGYSVLDPGAGVDPEMRDKFRTYFAFDEKETLLGYFPGYIYRVLPVYGRLYVRVKTTPARSFAVLTRYQMILPIRDILSTEPSKAFHFGRYGLVMNLKGYEELFFEFGVEDRRSAFVRLLERQMEDVRSRAQLAGAAGQQDTRDALIFEEYDSRQSSSISSGSDMRGSTDAAVTESLPAHMFTSASSTFLTFKPKESLHFTFLTIGSRGDVQPYIALAKGLMADGHRVRIATHGEFKEWIESHGIEFGYVGGDPAELMRICVENGTFTVSFLKEGLLKFRGWLDDLLKTSWEACQGTDVLIESPSAMAGFHIAEALRIPYFRAFTMTWTRTRAYPHAFAVPERKMGGGYNYMTFVMFDQVFWRAISGQINRWRRKTLGLPSTSLDKMEPHKVPFLYNFSPTIVPPPLDWPEWIRVTGYWFLDSAEVSAQKWTPPAELVQFIDSAHQAGKKVVYIGFGSIVVSDPKGMTRSVIEAIVRSGVYAILSKGWSDRLNAKTGEASEPEEPLPKQIYQINSIPHDWLFQRIDAACHHGGAGTTGASLRAGIPTIIRPFFGDQFFWADRVEALGVGAGVRHLTSESLAQALIAATTDEKQIQRAKVVGERIRAENGVGTAIEAIYRDLEYARSLIKRRADEDVGSDAENATIRESLEALPDPQSPESVASSYGSGPRASSDWSVISGDDGTPSSLTSRRSSYGGDGRLDRPQLPKRNSLAAAVLSVLPSPAAIRPRTPRSTSSPSPSR

SEQ ID NO: 7493 - protein, 1881 aa, Talaromyces islandicus
MHRLVNALFLIWIAFGVDANSQIPLQSKTETEPHQFLGAGSAGASAAYYLRQFADDSDIPLNITVFERSHYVGGRSTTVNVFNDPKYPVELGASIFVSVNYNLMEAAKKFNLQISSTLQDRPRQSLAMLGIWDGERFVYTQSHSMTWWDTAKLLWKYGLAPIRTQRLTKQVVGKFLNLYKSPYFPFSSLSSAVVDLELHKATAVTGAQFLEANGISGSFPREIIQASTRVNYGQNLGLIHGLETMVCMATDGAVAIENGNWRIFSGMLGASGAKVALNTTVTSIDRNEDDTVSISHQGKDGISSISIFDDVVIAAPYQASGIDISASLGQAPDKIPYVRLYVTLFASHHQISRRYFNLSDQNEVPEMILTTLPENLDLGSHEDGVGPTGFWSISLLRVVEAPAEDPDHKHHYVYKIFSPKRLSAEFMASILGLDIPVAGKNATIGDLPSHDVSWFHEKTWDSYPYEYPRQTFEDVKLASNIWYTGGIESFISTMETSSLMGMNVAGLMVNEWHEQTGRQFVFKEQYNSMAFREDAGKARSKNRKFSLSKSLHHLPSQSVPDRLKDNNDEDDQEDVMAPPKSLGDQDLPYMNRSIFSMITAAGSRSSFHSRFDDSSDSDGGEVTKPARVDLLRKQAARYKPARKESGTSLSQPIPEESEQQTQSPSDEGTIHRTSSSKSRPRSIASRKSSKGKQPSDDINEPGTDENESPLPPAQETESTTPRSAPVLSRMIEAQTRFDTSALSSEEHAHLEKEECGRSSELEKSTNLLSIRLKEIFKFESPERVIAEYPCWLMQSIALQGYMYVTEKHICFYAYLPKKSNTAIKSGYLSKRGRKNPKYNRYWFSLKGDVLSYFADPSNLYFPSGHIDLRYGISASLSENPKDKEGRDFTVTTDHRSYNFRADSAASAKEWVKALQKVIFHSQNEGGRVKISLPLENVIDIEQSPMMDLAETFKIRVVDIYETYAIDEHFFSFFNYGQDAFDVLKGLINDTAQKDTEKPLALNDIEQARQRSDSGTSEFVKSRAGSESRRKSGISDVIAQEQNNDSESFVQSLGHGTESSISLQSQSDTVVTASQILNRSDVFQSPTINRLHRAPSAPGDASRKAKEGKISPQHGFDGPVSRQGRSLGLKAGELEQKGDSESEVYSSSAPSIHEIVKVGAYPLQRAAGFAEYLRSRSRQMSSLLATESMGYIEKVSGMWAGAGKHYIDGDDPITDRYIDGADAETNASYGDRFRAHFALPASEKLQATYYGYLHRVLPLYGKVYIGNSKFCFRSLLPGTRTKMILPIKDIENVEKEKGFRFGYQGLVLIIRGHEELFFEFNAADSRDDCAVTLHHRLESVRFLEQSSILLQKDVDEADAAKTEQQLLRDARNGPSPETSLEVHPIFDDPRASIINFKPTESLRITCLTIGSRGDVQPYIALCKGLLEEGHQPRIATHAEFEPWVRKHGIDFAPVEGDPAELMRICVENGMFTYSFLREASLKFRGWIDELLSSAWVACQGSDVLIESPSAMAGIHIAEALRIPYFRGFTMPWSRTRAYPHAFAVPEHKMGGAYNYISYVMFDNVFWRAISGQVNRWRKIELGLRSTNLDKMQPNKVPFLYNYSPSVVPPPLDYPDWIRVTGYWFLNEASGWTPPIELTRFISQARADDKKIVYIGFGSIVVSDPAALTRTVVESVQKADVRCILSKGWSDRLGDPKSARVEVPLPPEIHQIQSAPHDWLFSQIDAAVHHGGAGTTGASLRAGVPTIVKPFFGDQFFFGSRVEDLGIGICMKKLNVSVFSRALWEATHSERMIVKAKRLGEQIREENGVSNAIQAMYRDLEYATTLTRQRAAVSSTPYTPTGGDEQQGLDGESEENEAWTFVDDDTNFEQFKRGQDLPRDDLF

SEQ ID NO: 7494 - protein, 1260 aa, Trichoderma atroviride
MAPDENQRSRPKRQPSTRTPPRRRDRAASEALVTDGFVLPALEAPADAPPAYGNHHDQLQFKRSGFDAEAAVTGDGRINININTKNHRLAELLAPSIANQIAVTVQPTRPPVYTLPSLAGEPGKQPPPRLNVVIQIVGSRGDVQPFVALGIVLKEKYGHRIRIATHPTFQKFVEENGLEFFSIGGDPAELMAFMVKHPGLMPGLDALKSGEIGKRRRGVQEMLLGCWRSCIEAGDGLGPPPEPHRKLEPWDPDAGMPGDPNHEPFVADAIIANPPSFAHVHVAEKLGIPLHMMFTMPWSPTRAFPHPLANIQYSNADDVLTNYLTYTLVEMMTWQGLGDIINRFRESALDLAPLSLIWAPGLLNRLKISYTYCWSPALIPKPNDWGSHIDISGFYFLNLASSYTPEPDLAAFLEAGPPPVYIGFGSIVVDDPNAMTRMIFDAIHLAGVRALVSKGWGGLGADAVGLPDGVFMLGNVPHDWLFERVSCVVHHGGAGTTAAGIKAGKPTLVVPFFGDQPFWGAMIARAKAGPDPIPYKVLTAENLAEAIKFCLKPETQDQAKALGHRIREENGTEAGSRSFHNHLDIDSLRCSVAPSRAAAWRLKRTKVRLSPLVAAVLVKQGLLKYTDLKLYRPYEYNTEDQPPDPISAGACSLVTDISDIGMAIVDMPLDILKSPKKARESLKDSGSQASGDDSDTGSKRTSTLDRPGVKSPVRTSGESAGETSATTGQLTQFPTLPTQIGRTRSPTVESQGSRSSSRRRALSAAATMEAAVGTTKNVGRIVSTGVKSPMNFCLGLAKGFRNIPRLYNDDTVRSIEKVTDFNSGVRVAGKEFGFGLYDGISGLLTHPMRGAQKEGAAGLIKGVGKGIGGLIAKPAAGFWGLPAYVMQGAYAELNKFLSRSVQNYIITSRVVQGERDLQNASEGEKADIIYRWNHDSDLKTIQETKLRGQDREHSRVGSGGGPTSWFPTLQDGRRQMGAALEEKPRRQRSRSGRISRGFSLSRSSSPAPVNWEESLNTDAEFEEAIMASVRETSRGNDEEDAMVEIAIRESIMAMQQQGSSLPDPVRLKTEGSKNSADVFEDEEYKITDEEYQNLIEQAIRESLAGHEKELSVLPGSSSRDLDVKFAQTDEPRSSGSAFTPNTDEDTDLQRAIVESRKVPPTLPPREKEDDEEEHFRRAIEASMNEMERIKKEKTEEEIVMEYVKKQSLAEDEFQKRKDSKGKGKEVSEVASNASDDEELKRAIEESLKMNGGDGDGPSGL

SEQ ID NO: 7495 - protein, 1125 aa, Zymoseptoria tritici
SRAAKPKNGHRKRLSENKLVRKVLRPVRERADSQDLMTQSQFLPPRKEMAEDREKQRISPSRKKSSSATDLKREAAKPSSPITIKQSRERSESPEAPMVHEEIDDEPKSLSTVLAQMFQFEQEEEVIAEYPCWYTVNVLLQGKLYITGKHVCFYAFLPKRHNKIIKTGHIGKVGKHSYRYLRYWFLLKGETFSYFKDSHDPYFPLGVVDLRNGISADITTKAGEDTTEFTLTTQTRVYKYKADTPGSAMEWVKQLRKVMFRCHNDGNAVKISLPLENIVDIERTGVVKAAETIKLRVVDNEETFAVDEYFFTLLQSGDEAWNVLKDLTDGNNAKQMGSDAALQDAHPFGKTKSQKSEKSASLDKDRYLVAEPVRTTLSRPNIRAPSSPRRSIEQQRSSTEASRRHSGETSRAILHRSESSGSIKTLTANDKPARPTQGLMIRGISTPLQHAMNVAGMVRTTSKRMSSYLSSSPKDYLGKFSGALAGGKIQYDEVEGLTPDDSVRDTDRDASGLTAEDRFQRHFGLALTEKLTCAFYCCLIKTVPVYGKIYMGSRHFCFRSLFYGTKTKIVIPYRDIINVQKQRGFRWGHPGMCLIIRGYEELFFDFSNKGLRDDCAIRSLRILDAMRNSAEDPALLTDDELQDAAEAAAENNTLQTAKKQNLNTNELQMAVDATNDDPDAPPILFDDDLSSSMLDFKPKEPMNITCLTIGSRGDVQPYIALCKGFIAEGHRASIATHAEFGDWVKSHGIEFKEVAGDPAELMRICVDNGMFTPAFFMEANSKFRSWLDGLLITSYEACKGSDLLIESPSAMGGIHIAEALQIPYFRAFTMPWTRTRAYPHAFAVPGRKLGGVYNSATYTIFDGVFWQAMSGQINRWRRHTLDLPPTSLSRLQQDKVPFLYNFSPSVVAPPLDFADWVKVTGYWFLDEGTNYSPPPELADFISRTRAEGRKLVYIGFGSVTVADSRQLMQQVMEAVRKADVNCILSKGWSDRFSKASSTPDAPLPDYIHQIRSAPHDWLFTQVDAVVHHGGAGTTGASLRAGKPTIIKPFFGDQWFFANRVEDLGVGSHLKKVSANQLGKALWVATHDARMMEKAKVLGEKIRSEDGVGEAIKAVYRDMEYARSLV

SEQ ID NO: 7496 - protein, 409 aa, Streptomyces sp.
MTAGSRGDVAPFTGLGHGLARAGHAVTLVTHGCFEPLVAGSGLDFHALPVDPRAELESTRGRGLHRSATDTGKMLRAVGLVRAALARMTDDLVAAAEKSDVLLLSGSLGPVGHAIAEALGVPSIGTHLQPLSPTREFAPPLLGGGHWGAAANRLAGHGVNLAMERVFSAAVPTVRARLGLPAARRGTARRIRAGLRQPVFHGFSPLVVPRPRDWRPGLRVCGYWWPYDREDGLPAYVRRFLDAGPAPVFVGLGSATVPDPARLSGTIVRALRLAGLRGVVQRGWGGLAATGEDMLTIDEVPHAALFPRMAAVVHHAGAGTTAAGLRAGVPAVPLPVQFDEGFWAERLVSLGVAPHAVPLRGLTANGLAAALARATRNPLHRERAETLGARIREEDGVAPVLRAVDLLAR

SEQ ID NO: 7497 - protein, 615 aa, Arabidopsis thaliana
MASNVFDHPLQELEGEDNGVKSEKASLLETSGSVDTTPEDSGHRSSDGHRGLDHCETAPVGLYGDMLINDSEIQYSRSLTEKGSPAIHNLKLDRLSEQEKQKLIVELVRIQNDGTVEVIDNGTPVSELWEFEPTKGQSTITYEKSLTESFRSIPRLKIAILVVGTRGDVQPFLAMAKRLQEFGHRVRLATHANFRSFVRAAGVEFYPLGGDPRELAAYMARNKGLIPSGPSEISKQRKQLKAIIESLLPACIEPDLETATSFRAQAIIANPPAYGHVHVAEALGVPIHIFFTMPWTPTNEFPHPLARVPQSAAYWLSYIVVDLMVWWSIRTYINDFRKRKLNLAPIAYFSTYHGSISHLPTGYMWSPHVVPKPSDWGPLVDVVGYCFLNLGSKYQPREEFLHWIERGSPPVYIGFGSMPLDDPKQTMDIILETLKDTEQRGIVDRGWGGLGNLATEVPENVFLVEDCPHDWLFPQCSAVVHHGGAGTTATGLKAGCPTTIVPFFGDQFFWGDRIYEKGLGPAPIPIAQLSVENLSSSIRFMLQPEVKSQVMELAKVLENEDGVAAAVDAFHRHLPPELPLPESSSEKKDEDDRPDLLQWFFIQIGKKCCLPCGGV

SEQ ID NO: 7498 - protein, 432 aa, Catenulispora acidiphila
MKVGIVLFGSRGDIQPYAALAHGLTAAGHEVVIAANADAAPIVDAVGVRFVPVAELDIRKWLSSPVGQEALMAGTAQALLDSANAWIVSALPSLVAATKEVADGADVVISGFPMDDYVAAVCAAQGVPMIIGYLTPWLPTKEFPPAYMRVGRPDPELLSGEDNLRTYQEFEEIFWRGRREAVAELRASLGLAPVDRPLLQTAPDLGYTVLHAYSPVVVPTPQDWGQGNVFTGYWRLPAAARERLGEAVPPAELVEWLDAGTPPIYLGFGSMPIMDPAPVLRMAAAAAERAGVRILIGAGWTDMTEAAAGLPDHVAVVNEVDHDWLFPRCAAVVHHGGAGTVAAGLTAGRPSFVFSMFFDQPYWGAQIARLHAGGGRMLTEMDLDTLTEAMVLLGDGHVRGHAAEIGDRLRQEDGVAAAIKVITDPARAVIPR

SEQ ID NO: 7499 - protein, 1587 aa, Magnaporthiopsis poae
MESSDGANRRSAPPPPLAPTSAQPAAVSPPLVSPPLRRGLSSRQPARASIDRHPRPSEDDAKKRARKLQKKRVHTPHSPVMEIPERLRESDPEDEDDANRRPPFNMNQSIFGLIAAAGSAVDFNDRFDRASSDEEDEDAPADDDESDSRGRFGMAQTTVFGGKKPPKDSPNLEVDKKRRRTSGSKLLRSLPSLSMPKRLSSLSRKNKASKAKELQIAEEDEVDSPTSPAVGDFHAASHADGRLPPVMTRMLEARAELSASRPSLDLEGTSGSNSPVSGESRPSPLARKLKQIFEFDTVEDVIEEYPCWLLQSVLLQGYMYITKNHICFYAYLPKKANEVAKSGYLSKSGKRNPKYNRYWFRLKGDVMAYYRDPSNLYFPSGQIDLRYGISASVTDKDKDGVNFTVVTHQRTYHFRADSAPSANEWVKSLQRVIFRSHNDGDSVKISLPIQNVMDVEEMQLVQFAETCKIRVIDNDETYAIDEYFFSFFSFGKEAINLIKILTDGAGGTQKPDDPAHGLPETPTDGVPSRNPSTKRNSMSGSRERRPARLNDTVRATLSPMGATSPPNPSPRASGDFTRSSFDALRTFGRRSLDLNTAVTMREESQERRSFSGTRHARSRSRHRLGEQSTIPEKQESSDSYVQSINEDPSQASLSALVTSSSEDQSASQILRGSDVFHSPTVRRSPSESRPKGATDSSAAGNQALTQTSQWSPPIKIDRAAATGSRQDTGAGLGIQQGPPTPGMQGLANMASLPVRSAGALAGYLNRPLSPFRRMSNLLATESMGYVEKVSGMWKGGRRHYDENSALKMDDELPEDDDEDKVATSRERFRQHFALPESEKLVATYFGYMLRVLPLYGKIYISDRSFCFRSLLPGTRTKLILPLRDVENAHKEKGFRFGYSGLVVIIRGHEELFFEFGQADIRDDCTITLLQQLEEARYLRDSGLLCQEEKEDAETAAAERDALQEARQEEHPEHEIPLPRQTSVVSDAPTILFDDPKASFLNFKPPQPLRVTCLTIGSRGDVQPYIALAKGLLAEGHQVRIATHAEFEPWIRSHGIDFARVEGDPGELMQLCIENGTFTWQFLKVAASKFRGWLDDLLSSCWEACQGSDLLIESPSAMAGIHIAEALQIPYFRAFTMPWTRTRAYPHAFVMPEHKMGGAYNYVTYVMFDNMFWKMTAQQVNRWRNHMLGLPNTSLEKMQPNKVPFLYNFSPYVVPPPLDYSDWIRVTGYWFLDEGTPNKAAAEVKPGEGGEEDDGSKSKQQATKASGADWTPPRELTDFIDKARRDGKKIVYVGFGSIIVPDPAKMTQEVIDAVLKSDVRCVLSKGWSDRVTGSSEAKPSADGAADSKEKAKDKTEGGDQQESVETPKEEPKLPPEILQIKSAPHDWLFAQVDAVAHHGGSGTTGASLRAGVPTIIRPFFGDQFFFGARVEDLGVGICLRKWGTNSFARALWEATNSDRMIVKARVLGEQIRKESGVETAIQCIYRDLEYATSLIKAKASKNAKHQKTQQEDGTTDGDDEGDDDETEEWTFVGGNIPDDGISSPRAGTFPDATAGGSVGKKSPSIAATSTSMARSSSRKSLSRVLGGL

SEQ ID NO: 7500 - protein, 1213 aa, Rhizoctonia solani
MASRQDDSASSSRSSSLNRGDELSRRSSTWSSSLDPSNGATSAGQPSLFRILNAAAQYSQLILHEDSSESDSDVVETPASDSAADAQIGLAENDNKQHDAYPSPETALANLALHPHVRPQAGSVTSLQRFAQYATGMTPEIRPKDIRDIKEGINQEGREPIGCDSSKVSDHAVALRILQHEFGELTLPGEVEEMLLETDAALFRDVTILGVIHLTTHRITFHASLLPGTNRDPPGGSTFSHDSHRSADSQILKAGPGVVIEPRTGILHPQKRRRVWIELSHDMITSYPDASDEGRVRPIRSILLSNVKEIDPYDPTQPNRVRMHMSVLGLDVTGDVELDTEESAHEWRRELSAALYMYRHHRKTLIGHGNEKIAPRPEDAQTESRGVRICIPLALIKEYQHEWWAAWACILSVAVEHRASPAGVRDIVPSGGLDNAVKSVLSAVAPFGSELEQLAQVTMPKSTKRESFTGLFSPATTQVPTLSPVTSISTDSSSARETTTSSHVPTSPGPWLQTSPSSSESEGLSQVLHLSVLQGDEKWYQFDNLIKARRENGAPPNAQVVLDWGELVFDEHTGSEHGSEPTREVKVEASASNEMSSAERKIRRLFAIDDQQKVWIARCRVCRTISSTTYFVITDRFVCYWAKSFGTHDTRYRFPVSSVRGASTAYVYAPLIYGLRLQIRGQHDLTFEFNSRELRDEALAKLKAIADTNLASENGPTTTAGSEVSSPRIERPSPLTVPEFSSTQECVSNAPALFSPLSRTMRRAQSVHIPPALVSRFPKPINLPPSTMVHIPPKHFVCLTIGSRGDVQPYIALARGLMAEGHRVTIVTHEEYKEWCEGWGVAHRTAGGDPGALMKLSVENRMFSPQFFKEGLTNFRDWLDELLLDAWKQCQDADVLIQSPSAMAGAHIAEALKIPFFHAFTMPWTRTNDYPHAFMTPPVEISGSFNYSTYVVFDNVFWQATSGQINRWRRKHLGLPSTDMAHLAQTKIPFIYNFSPAVVPKPLDWKDPITISGYWFLDDADLNWKPTQELTDFMNKARQDNKPLVYIGFGSIVVPNPKAMTRSIVKAVLKSDVRAILSKGWSARMSKETGPEVELPPEVFSVDKIPHDWLFPKVDAALHHGGAGTTGASLRAGIPTLIKPWFGDQFFWATRVMKLGAGLRVSSLSSSDLAEALKRAVSDRVMKEKAAAVGEKIRSENGVANAIRAIYTYLPRA

SEQ ID NO: 7501 - protein, 612 aa, Trichophyton tonsurans
MSRAFWRLCELLAHQGHQELPTTFPPETEEELQRLYDQVSGRQRSRSTGGGENEVGATAEMGSNSGSGLAEGNANDTFDTQTLKSSISNLSQDNSPMFFDDNSASIINFKPTEPLRITCLTIGSRGDVQPYISLCKGLLEEGHKPRIATHKEFEGWIREHGIDFAPIDGDPAELMRICVDNGMFTYAFLKEASENFRGWIDDLLASSWKGCQDTDVLIESPSAMAGIHVAEALGIPYFRAFTMPWTKTAAYPHAFAVPDRNLGGTYNKLTYVVFDTVFWKAISGQINRWRKNQLNLKPTSLDKMQPDKVPFLYNFSPSVVPPPTDYLEWVRVTGYWFLDAKPDWTPPEDLVAFISKARADKKKLVYIGFGSIVVSDPAAMTRTVIDSVLKTGVRCILSKGWSDRHGDPRSSQMEVELPPDIYKIDSAPHDWLFAQVDAVAHHGGAGTTGASLRAGVPTIVKPFFGDQFFFGIRVQDLGVGICMKKLNSATFTRALWEATNSQRMIIKAKQIGERIRQEDGVGKAIQSIYRDLEYAKTLTYLRRSAAGSPTNEGIEEDNNGDFLDGIEESWTFIGDDIFTKAQDPSSDLSTMMDGAAAGTLPPPDDDEDDVAC

SEQ ID NO: 7502 - protein, 1467 aa, Colletotrichum sublineola
KRVGKKLLKKRFETNTPAIELPERLKEGDDSREEDLVPTQGPPMFMNMNQSIFGLIAAAGSRVDFHDRFESSDDESADDHDHHDRHRESADDKTRGLGHLLHRKQRRPDTQQQPDLSKTTVLKKDSSSKSEKHRRKISGSKLLRSLPALPRLPRHKSKKEKSKPQSPSEEASHASEARSTQPANHIREEEEAEEEEEEEEEDEDEDDRDQRLAPVMSRMLEAKAEMSARPSFDIERLSADQLTYSDSAESNSNALARRLQEIFEFDHPEAVIEEYPCWLLQSVLLQGYMYITAKHICFYAYLPKKAHEVVKSGYLSKSGKRNPKYNRYWFRLKGDVLAYYKDPSNVYFPSGQIDLRYGISASVNDKKDGLAFTVVTHHRTYHFKADSAPSAKEWVKSLQRVIFRSHNEGDSVKISLPIENVIDIEDTQMLEFADTCKIRVIDNDETYAIDEYFFSFFSFGKDAINVLKILIEDASSNAKDAAKLKAAQGQEEKQQQQQQSSVAASARSSMSASRRPTAPLKLRTNKLPDAVKATLSPLSPHSSSALSPRASMDAAHASFDAFRGFRRRSLDLSTIMRDSSPRRSFSGNRRSMSRNRLDESRHAPHKQGSTDSYVQSSMEDPSYSGMVASSSEDPSASQILRGSDVFQNPTMRRSASASLTELEENRQREPRSPPALAAYSGQHAATTGSINDGDKPPATPTLQSISKMGAFPLQRVGAFAEYLNSTRSKLGSMLATESMGYVEKVSGMWRGGRKHYDAPPEIKTDDEDLYEDAEGKIQTSMDRFRAHFALPETEKLQATYFGYILRVLPLYGKIYISDKSFCFRSLLPGTRTKLILPLKDIENVDKEKGFRFGYSGLVIVIRGHEEVFFEFGQAELRDDCAVTLLQSLETTRYLKETGDLDMEEKEEEENAMAERDALKEARQVDEFHDHELRLPKGSTGVSDAPTILFDDPKASFLNFKPPHSMKITCLTIGSRGDVQPYIALCKGLIAEGHKPRIATHAEFKDWIEGHGIEFAKVDGDPGELMRLCIENGTFTWAFLREANSMFRGWLDELLVSAWEACQGSDLLIESPSAMAGIHIAEKLSIPYFRAFTMPWTRTRAYPHAFVMPEYKMGGAYNYMTYVMFDNIFWKATAHQINRWRNNTLKLPNTSLEKMQPNKVPFLYNFSEYVVAPPLDFSDWIRVTGYWFLDEGSDFQPPKELTDFIAKARADEKKLVYVGFGSIIVNDTAKMTQEVIDAVLKADVRCILSKGWSDRVAKPEDAGGAKKDEPVMPPEIFVIKSAPHDWLFSQIDAAAHHGGSGTTGASLRAGIPTIIRPFFGDQFFFGGRVEDIGVGICLKKWGAVSFARALWEATHNDRMIVKARVLGEQIRSEHGVENAIQCIYRDMEYATSLIKRKAGKHAQAEEDEEEEEAEESWTFIGSDEPDPDMTTKKLSEMGGSPGLPEPKPLGNRVMRVSPSASQQQQQAV

SEQ ID NO: 7503 - protein, 624 aa, Vigna angularis
MMGSNEIQCLTQEVSEGVLDGRQKNDLKKMEIVKSQGEDEKFGGASSEDDESVQVSSSSRRGLEHCITAPVGAERNPLIVDDKFMISRSMTEKSGFPKRDTILDRLSERAKQLITNLVKIQNDGTVEVDLERSASVAPELLELQSFEESTVSGGFGSESKKFVPRLQIVILVVGTRGDVQPFVAIAKRLQEYGHHVRLATHANFKTFVKSAGVDFYPLGGDPRILAGYMARNKGLIPSGPAEISVQRKQLKAIIDSIPPACTAPDMETGVSFRAQSIIANPPAYGHVHVAEALGVPLHIFFTMPWTPTYQFPHPLVRVPQSAGYWLSYIIVDLLIWWGMRRIINNFRKSTLKLAPIAYFSMYRGSISHLPTSYMWSPHVVPKPNDWGPLVDVVGYCFLSLASKYQPREDFVRWIKKGPPPLYFGFGSMPLEDPKGTTDVILEVLRDTEQRGIIDRGWGNLGNLTELSDNVFLLEECPHDWLFPQCSAVVHHGGAGTTATGLKAGCPTTIVPFFGDQFFWGERIYQKELGPAPIPISELNVENLSNAIRFMLQPEVKSRAMEIARLIENEDGVAAAVDAFHRHLPDELPLPTPSLVEDEDLNPLQWFFLRLGRFCCAPCGGIFGA

SEQ ID NO: 7504 - protein, 375 aa, Pseudonocardia endophytica
MRVLLATYGTRGDVEPVLALAVQLQELGATVQVCAPPDVELVAVAERSGVALTTFPKPWRSSETAPTTAEERVVDPSEFVTEHIDITFCPLLEAAEQNDVLLASGMLHFVARSVAELTGIPYRFVVFAPVLDLPQRDAVIGPPINAHRSSLGLATIDDVRSLLFTARPWVAADPTLWPVSEPSSVVRSPAWILPDDRPLPPGLEAFLDAGEPPVYVGFGSMRVCEDAAAAATTAARAHGRRTILARGWSGLSAIDDRDDCTVVGEINQQALFRRVAAVVHHGGAGTTTAAARAGAPQVVVPQAADQSYWAARVTELGIGSTHHGARRTTESLSACLDIALSPETRRRADALSDLIPVDGARTAARWLLEFAADRT

SEQ ID NO: 7505 - protein, 840 aa, Colletotrichum fructicola
MLEDDTVPQDYLPSYETAMAESMRQQRNSVNSDGRIDVNLDSRLATTLARFVPDFKDPSIAAATAAQGPPPEYVEAAARFADKKNFPVKLNIVIQVVGSRGDVQPFIALGNELQTYGHRVRLATHDVFDSFVRKSNLEFYPIGGDPSELMAYMVKNPGLIPSLKSLKGGDIQKKRKMVKEMLEGCWKSCIEPDTLTGRPFVADAIIANPPSFAHVHCAQALSVPLHLMFTMPWSSTRAFPHPLANLKFGEKGVVDQSTANFVSYSIVEWLTWQGLGDVINEWRKTIDLEEVPFSEGPVLAEVQKIPFTYCWSPALVPKPEDWPAYIDVCGFFFREPPQYTPPPDLAEFLAKGPTPIYIGFGSIVIDHPEEMTKTLVEAVRATGVRAIISKGWSKLGGIEADDVFFLGDCPHEWLFANVAAVFHHGGAGTTACGLLNGRPTTIVPFFGDQPFWGDMVAIAGAGPKPIPHKQLNVENLSEAIRFCLTPEALTAAGELAAKMRTENGVATAVKSFHANLPLEDLPCDIFPDQPATWEYKRGKKHVKLSKKAAGILLDHLKIGQKNMSPHDTRSIIIENRRWDPVTGASSALLGAATGMFKGATDIVVKPVQTYHERSKMNLAPPSSEALERPRSAGPGSSSGSTSASGSTTGAVLKASASGVGGFFKAYGKFYLDVPLAVTDGLRNVPKLYGEKVEQRKPINDWKSGTIEGGKHFVVGLSEGFADLFVQPYKGGRDGGAAGAALGVGKGVLNMATKTASATLGIVAYPGQGIYKSIRTAVHSKTRRNIAAARQAEGEYLASNSSFEVQAVLHRFDTLCRISEEKKEKKGRKSDEPELMERQTY

SEQ ID NO: 7506 - protein, 1387 aa, Verruconis gallopava
MDLPERLREGSDEERDICAPCHGGVNLNQSIFSLIAAAGSAAGLDEIANDSEEDGSHDGTSLSQTVPALQPTAAGILMNETSQAESFQHRRRSSKAKLIKSINKLKMKPLRGRKGATATNDIMSSSQILQPRQEQEYEEDIEDATLANAPHLSKILHADIQMRKELGRAHDGQRTAQDLLQPSLSLAEQVQKLFKFKEKQDIIAEYRCQLVQNVNVPGYIFVTKRYICFYAYLPHMTSKVVKTGYISKRGMHDPRYHRFYCELKGHVLSFYEDPAQINYPRSLIDMRRAIGVFATRGEKGKDETHFTLETDKRQYQLKADSVESATDWLRVLQQELLNTHNNGGLIKITLPIDNILDIENNYIRGMAFSESLRIRVIDNDETYAVEEYYFTFDSHAQEATRVLKLMVQSHDEPNDSDMSGSEERSSGRHSLVERPSAVPAHTPPLRESVRSTLYPHSPEIRAFSGSRISTGSRKSSLEVESSMELRRRSNDDDNDDGRNSVPISGRCKRSPASPTPGDSQESPYSPTMTSADQDTESSAAIQSLDETIDDTNASESQILNRSDVFQVPTLYAPSPKKPRTETDVAVPQRASQDTERRKARSPSDERLSVPKRPAAISRAVWGELTQYQHDAPKMINSSYSIGRLMKAGMSPLQSASGIAGYINKQSKQMSSLLATESMGYYEKVAGMWHGGSRHYASPHGMRLDDNVPDKQEEEQAMKDAQRFREHFALPESEQLLASWHCYAQRTLPMYGKLYLGSTHLCWRPLMARTTKMKLPLKVIETALKGTSYRLGYAGMCLVVSGDEEVFFDFNNVGLRDDCVVSILLSLQSIETNAHVVESGLFSQEELKATKLAKAEHQALLKARRAEKIMDESEDEHDDLAESMMFDNPSTSALDVRPQGSLRITCLTIGSRGDVQPYIALCKGLLNEGHKPKIATHAEFGPWIQQHGIDFAPIEGDPAVLMQLCVDNGMFTLSFMREATLRFRSWIEGLMDSAWKACQDSDIIIESPSAMVGIHISEALQVPYFRAFGMPWTRTRAFPHAFFVPNNKSGGTYNYMTYTLFDTLFWKSTSGQINAWRKRQLGLRPTSLSRLAINKVPFLYNFSKHVVRQPLDWSEWVRITGYWFLDEEQGWDPPEELINFIKKAKDDGKKIVYIGFGSITVENPAALTHTVVRAVVDNDLRCVLSKGWSERLAKAPQLVTAEPDFPPEVLQIKYSVPHSWLFPQMDAIAHHGGAGTTGASLRAGKPTIIKPFFGDQYFFGSRVEDLGVGIYIRILNEKKLGRALYYATHDERMRKKAQYIGEQIRSEDGVATAIRAIYQDLDYARSLVQKKSSKSDAFGKDGHFDFEHEMDEEQWTIVGDEVVPDLKQMPKSMHQDQEEEGLVGEVKN

SEQ ID NO: 7507 - protein, 1464 aa, Alternaria tenuissima
MATSQDRGRDRTSRRLSRKRRNSAREARGMSLDVPERFRDGDDAQEDVTAPKRNNTMSMNQSLFSMIARAGQQSQTDLGTMAEVDSGDSDDGGGKRKTYRNLDGAARLSRLSSANDFQSAEQDADDKMDKGKHRRTLSENKYLRNLPKLKLSSRKEGQAQGRTSNRSDQNQMSSSQFLPPKPSPDDLASPPSSSAMPTKTKTKDKDKKDIGAGEDMAVDKAQASGRKSRHGSSAGLAKSKTPVTLAQRIQQIFEFEEVEEVISEYACWLLQSILLQGYMYVTQKHICFYAYIPKKHHDVSKTGYLSKRGRSKFNRYWFVLKGDVLGYYTTPAELYYPRNRINLQYAISAEVIDPSANTKKGEEETSFAITTDERRYLFKADSAASAKEWTRAIQKVIFRTHNEGGSVKICLPIGNVIEIEESKMLDLAQTVRVRVVDNDETFAIDEYFFSFFNKGQDALNVLRIMINDNEHHQALQQQGGDGEASTPVATPTISTETPHIHENVRATLSPLPAPHAGRTSISDVSARSSNDANRKSWDVRRSMDAGRGFRRTSQEVRRPSHEVRRSFSNRGRQGDRTPGIVGGGGSGEGGSHSRQSPGAADSESAFDPGTESSVAIQSMDESGASASQILDRSDVFRGPVNTPLHKLDTHTRHSQDTARSTQPKSANRSKRPQTPTGAPEFEDDTDNSAQPRLSGSSSALQDLASYPLQKASGLAGFLRTRSKKISNLLTGGESMGYYEKVSGMLAGGRKHYNTAEGLETGDQIHGFEDDEDAAKAAENFRDHFAFPETEVLQSSFFASLQRLVPNYGKIYISGRYFCFRSLMPISKTKIILPMRDIENVNKEKGFRLGYHGLTVAIKGHEELFFEFSKAEYRDECAIMVLRVLENTKYLQEEDSSSSGVDSDDEAAKAEHDLLQQAREHTDTDKPANMSDIVRAADHDRIPLIFDDPLASFVDFKPSEPLTIVCLTIGSRGDVQPYIALCKELLKEGHKPRIATHAEFEPWVRKHGIDFAVVDGNPAELMRICVEHGMFTYGFMKEANAKFRGWLDDVCSSSWRACQGADVLIESPSTMAGIHIAEALEIPYFRAFTMPWTQTRAYPHAFTVTEKKMGGTYNNYTYTVFDKVFWTAIANQVNKWRRRELGLQATNQHKMQANLRPFLYNFSPHVVPPPLDWPDWVRVTGYWFLDESEMYEPPKELMAFIEKARRDGKKLVYVGFGSIVIDDPAALTKTVVDSVLKADVRCVLSKGWSDRLMDPTTKDASKPEIPLPEEIFQIQSAPHDWLFRQMDAAVHHGGSGTTGASLRAGIPTIIKPFFGDQFFFAQRVEDMGVGVWLKKVNTSVFSRALWEVTNSQRMIVKAKVLGQRIRKDNGTQTAIQTIYRELDRAKTLIKKQAKQPGDEGDATDEEIEADWTLVEEGEEMDAVAKHMAEQAAMGGIQQDASRTGGGSLVLGSMVLKGGGGMRRTS

SEQ ID NO: 7508 - protein, 994 aa, Rhodotorula graminis
MDVFGLDEPEEVVAEYPCWLFRAILLQGFLYVTAGHLCFYAYLAQKEGTTVRSGSLSVRSSRTRRYGKHWFVLKDSVFSWFPSSTDPYFPDGHIDLHYAISVEPSQFHKHHFKVATADKKWHFSADSEASRDEWVKTLKKGVFRCQNEGESVKIAIPLETIVDVEKSSSLEFAETIRVRVYDADEFRRTFGLSEKEILLDRFPAYLFRGLPIFGHVYISSAHFCFRSAGLLTAKTKMILPLSDIIGASKHRSYRIGYSGLMVIIKGHEEVFFELNNSDRRDACLANLDEQRELVKKQKRDQSGDDKKDDESEEHQQLRDLLDLSEARSAGQSPLDLPHPRSEAVQGQPPIMFSSTTSDFITFKPDEPLRVTCLTIGSRGDVQPYIALCKGLMAQGHKCKIASHGEYRKWVEGHGIEFSAVGGDPAELMQLMISHDFFTISFMKEAVGRFRGWLDDLLASAWKACQDTDLLIESPSAIAGFHVAEALRIPYYRAFTMPWSRTRAYPHAFAVPEVHMGGGYNYMTYTMFDQVFWRATSGQVNRWRRDTLKLKPTSLEAMQQHKIPFLYNFSPVVIPPPLDWRENIHVTGYWWLDNPDDSDQSKWEPPEELTKWLDEAKDNDKKVVFIGFGSIIIPDPLEMTRVVVEAAEKAGVYAIVAKGWSDRQKGDDDDGEPDEEKEEKREQNEKRHQELMDKPFIFSVKSIPHDWLFPRISAAVHHGGAGTTGASLRAGLPTIIKPFFGDQHFYADRVSTLGIGSHIRNFTVENLTEALKTAVSDDKQIERARLAGEEIRKEDGVATAIECIYRDLEYARSLVPPRSTALVEGEIAEVEVDDDSSDDDSDSGSSSSSSDEKDEKDEKVDDEKARLKERDATEANPGRPAISAPPTEKVQGVQDPSRSAQDPASPSQRDESRATSSDEGWDVMSRGSAADTTVSASWEDGGDASRASSKARSTRSGPEGGVEGAGGEEDDGGAGLTARMLGFLGKPVKAVKKDA

SEQ ID NO: 7509 - protein, 833 aa, Aspergillus kawachii
MASSSDPGVFESPGDPVIVPPTPIAADRKSGIKITKPQAANDNDLSLGSPPAYLESSWKVKLNILIQVVGSRGDVQPFIALGNELQRYGHRVRLATHDVFEDFVRGSGLEFYPIGGDPEELMAYMVKNPGLIPSMRSLQAGEIGRKRAMIRKMLDGCWRSCIEPDMATQLPFVADAIIANPPSFAHIHCAQALSIPVHLMFTMPWTSTKAFPHPLANVTGSGDEDQGFRNFVSYAVVNWLTWQGVGDVINHWRKELGLDEVAMFEGPRLAEILKIPFTYCWSPALIPKPSDWPSHIAFPSPSEDVCGFFFRDPPRYDPPADLLAFLAAGPPPIYIGFGSIVLEDPESITAIILNAVRTTGVRAIVSKGWSNLGGMHDDNIYFIGDCPHEWLFDRVAAVVHHGGAGTTACGLRKSKPTIVVPFFGDQPFWGDMVAAAGAGPTPIPHKELTVDRLAEGIRYCLSEQARMSAVAIAAKMQSEAGVKAAVASFHRNLPLECLQCDLDPGLPAVWSLRQKRRKFKLSKIAAEVLIADGSIDAKSLAMHAIRPIFIENRRWDPVTGGASAVVGTATDVADSILGAFYKPALEYHKFKEEREDQLSSSRSNLSVENLSDSLSVHTVSTDHEKEPRGMSISSSNNSTVSADSDAQKRSGTGKRKLFGRMAASSAKSLGSVGPAMIKGTTVDFPLALAEGLRNVPRLYGEEPRDHGPVTDIKSGFAVAGKGFAWGMAEAVSDIVVKPYQGLQKEGAKGAIKGVGKGVTNMAAKSGSAMFGLMAYSTAGIAQSLRSSGQSRVRKLIAQQRHSEGTWLLESGQYTATENIVATFRQKLRSTKDA

SEQ ID NO: 7510 - protein, 1450 aa, Cyphellophora europaea
MSTLDSAPRKSGSRKLQKRNRPNRMPSSRMPARLKLGDDAQDDVTAPDRGSQAASQYMNMNQSIFSMIAAAGSKTDFNTRFDDSSDSEEDIQEEDEVAYEQHETQDSTTAAPSKSQDAGSESTALKKKKRLSDNKLMQSLPKLSLRPHSRRKPSSHNSPSPSSDGTTKSSKSNPREAPVMSRLLTAEAALEAADEEEMLASGQKSTRARGDSSPATLLASRLMDIFGFEKPETVVAEYQAWLLQSVLLQGYLYITKYHICFYAYLPKKSNSVAKNGYLSKRGKSNLKYNRYWFILKGDVLSYYADPSAQYFPQGNIDLRYGISAALSADKDKQKDCKDFSITTDHRTYDFRADTAESAKEWVKSLQRTIFRSHNDGDSVKISLPIQNVIDVEESPVVQLAHTIKVRVIENDASYAIDDYYFSFFNNGPDVLNVLAGLVPDMSIPDGQDPGSHLDERRARSPGARKSLDMLGAPRDRSVTPLRESVRATLMPFSVDDNGKMSPRMSGEFSRPSKSPGRLSLDAGSLEYGRASFDRGRRSPSTGRLDVGTDRRSGRSPLARVHDSPESHNQIADNATDSSAPPLSPKAEAQMSASQILTRSDVFHQPRVQRMDTVPSVSTDPTRRSSEIETTQSSSPKQEATPPIPIRTRPAPKERVMSQDSDYFEARNEHSRERTSSPTIQDLMKVGSYPLQRAGVFAGYLKSKSNRMSKLLATESMSYLEKVSGMWAGNRKHYGANETILSDDRDVDPEDEEANVGFGDRFRMHFALPPTEKLQATYFCFLHRVLPLYGKIYISNRKFCFRSMLPGTKTKLILPLKDIENVDKEIGFRFGYHGLVLVIRGYEELFFEFAGAENRDDCAVTLLQSLEAGKYMEDDSTILNPDEDSAALARDEHRLLQEARKTSTQIEKEIDAPDTDETVYKHDEPPPILFDDPRVSIINFKPVSSLRVTCLTIGSRGDVQPYIALCKGLLADGHQVRIATHREFQSWIEGHGIEFKPVEGDPAELMRICIENGMFTYSFLREATFKFRGWIDDLLVSAWEACKGSDLLIESPSAMAGIHVAEALGIPYYRAFTMPWTRTRAYPHAFAVPGHKSGGAYNYYSYVMFDNVFWKAIAGQVNRWRKKELGLRSTSLDKMQPNKVPFLYNFSPSVVPPPLDYSDWVQVTGYWFLDEASDWTPPSDLVAFIEKARADNKKLVYIGFGSIVVSDPAGLTRTVCDSVLKADVRCILAKGWSDRLGDPSAIKTELPLPPEIFQIKAAPHDWLFRQMDAAVHHGGAGTTGASLRAGIPTICKPFFGDQFFFGSRVEDLGVGICLKKVNVSLLSRALWEAVNSERMIVKARAVGERIRKEDGVQTAIRAIYRDLDYAKSLVKTRADLQGRPVPQDDEEEGEIEETWTFIGDESDVDLQRKMQELDVGRTGRGPRVSMDQLRSVQGVEPVRSEGRKSGVFSRS

SEQ ID NO: 7511 - protein, 1218 aa, Lachancea fermentati
MSNSFSDETETESSVAPSKELTNSSSKSKWRNSKWPVGKMYHSVSNLANLRRESTSNETIKSGSTTEETTSTKEFEDDLARPCGMAKSIVGLLTTASVYAGMGEIEQAEDICEDENDNTDSDSDSTIEETSLHSDAFTQASRKDTLFEISIEPNEDARSLITSSSKYKPSKLFKKLSSRFDLDEEKDLFITQYSCWLLKDVLIQGHIFLTTQHLLFFAFLPKSNGTPKLSGNLTTFNSGSLGARSARYWAVLKDHTLSFYSSPKELYFPILTIDLRYTNKIEVVKEDGEVTADFKIYTDNKTFKFRADSEYASRSWCSALKKQVFASQHSKNDFMSIKIPLANIIDIDEQLVVAETVTLRVRVLESSESYAIDDYFFMFFNKSGITLKKTINVQLVNLELNGSEVLMAKKPFPDGDSIKEVSQNSSPQESEHRGRSLSTSRRLFKRVLSPVSLRNRHALSLSSSLSPRPPRKVKERLRSMTDSLMSKSPGQGDVEEELNIDYTSQNEQFNDEENLSDSEAFSEENHGRSDSPEGGEKPHYSRLARWTPRPIKNMGSMWSAHPVHYQFDKEQLFPGDDEYLTSSLDQQRANQRFKSHFSLDDDESLRAAYYTYLNKNIPIYGKLYLGKSVVCFRSLIPRSKTRMILPIKDLENCYKERGFRFGYFGLVLVIHGHEELFFEFSLRSSRDDAEFVLLKLLDIAKPALKSTEVEIDRTSKKTDNTGIIKNDNLTEAAKVKLFEDKINAEGFDVPFMIEESPYYKTSITPKKSYRFGLLTIGSRGDVQPYIALGKGLVKEGHTVTIITHEEFKDWIKSHGLMFKKIAGNPAELMSLMVQHGSMNVGLLREASTHFRGWIQQLLETSWQACQNLDILIESPSAMAGIHIAEALGIPYVRAFTMPWTRTRAYPHAFIVPDQKRGGNYNYLTHVLFENIFWKGVSGQVNKWRVETLGLEKTNLDLLQQNKVPFLYNISPTIFPPSVDFSEWVKVTGYWFLDEKSTYAPPAALIEFITKARRLNKKLVYIGFGSIVVNDPKEMTKAVVDAVVNADVFCILNKGWSERLGGDDAKSIEIELPECVYNSGSVPHDWLFPQIDAAVHHGGSGTTGATLRAGLPTIIKPFFGDQFFYAGRVEDIGAGISLKKLNSETLSRALKEITTNSRIINKAHQIKEAIAKENGIEVAISCIYSELEYARSLILAKRRKGKKVDSDDSNEEDSSWFLV

SEQ ID NO: 7512 - protein, 1583 aa, Cryptococcus gattii
MSPPTSPTSHSLQPPFPPSATAPNPNPPSQHQQAVESLVNAAAQHVGPTCPPTSDESPQMADQATNSPDDSLIWNRQVPEQEQTETAIIPGTPLDEMEPAKDAQTVQFSSSSPASTHEYQGETTARLNEPLTSSRAPSTASSQIDDWRRPDFGASRDIGSVRMGGASALVSALNALPWEEDDESDDGEDDDEFRDPAGGTSSAVYERKKRPQLPSTSHGSHPTHPIHFPFRQNAIARRARPPGTTELDYQYATSETSSRGMSETGSESSSEGEVPLPKGFVSPPNLIAPSAEDEATGPPDPKLISDRMEKEQQIADEEEQAEILRSSKEEEMRLGKEFVPGKSHGSAELNVDAALSEGGSEGEYVIEEQMQTNEAEKNLTRKDKLAERLMEVFGLEEREEVLEEMKCWLLRSIMLKGYMYLTKRHICFFANMPNENNLLVKSGPLYKKASRSKLNTKFWVVLKNDVLSWYENTTDPYFPKGNISLQYCHSCEAASGTRFKVRTSERNYTFTADTESSRDEWVKSIQKVMFRTQHEGESIKLIIPLEAVVDVDKSPTLEFTETIEVKCIDAEDQMSIDSYFFASFPNNDHAFSAIQKLVRERPSPPEVPRVSSATTIHVNQEPLDTSHATITRSGTNSSAEKLGTASHLPFRKFASVLKPLISKSSDGEPREEHSEDNHQDDHEASHLPHVEVTSNRQRSEEESDNDDFDGYPPRQVGPPPPSMNDDARNWRPSWIRKPASKLFGSSPSGSFVSSPGRSPMDSSTTVTETGPSLRTRTGRTKQSSVTEVLEPPIQPEEEVSEDEIPSKPSVVDSNSAEAARKRAARLSWTSETSSGSQMVKSKSDFSMLGSESGHSESAETLRKFRTFFALSDKEDLIDHFPGYLYRVLPVSGRFFISTNYFCFRSSQLLYKTKESFKLMIIPIRDLYGVKAQKAFRFGHSGLTVVIKGREEIFIEFRSASRRKACITLLEERMEAVRLSGENNTIDSRKVEVRIMEDLDESTPFEPKSPWPVSSSPLFGSTTSTSFLEFKPEPMKITCLTIGSRGDVQPYIALCKGLQAEGHTTKIATHGEYKEWVEGHGIAFESVGGDPAKLMQMCVDNGMFTVSFLKEGLQKFRGWLDDLLNSSWDACQGSDLLIESPSAMSGIHIAEALRIPYYRAFTMPWTRTRAYPHAFAVPEHGRGGPYNYMTYTMFDQVFWRAISGQVNRWRRNVLGLDATTFDKMEQHKVPFLYNFSPTVVPPPLDWTEWIHVTGYWFLDQADQKQGEKSWTPPEGLTGFIDKAHGEKKKVVYIGFGSIVVSDPEEMTRCVVEAVVNSGVYAILSKGWSDRGSKREEPKGDSQGADGVKYPPEIFAIDSIDHGWLFPRIDAACHHGGAGTTGASLRAGIPTIIKPFFGDQAFWAERVESLNVGSAIRRLTSHQLASALTKATTDEKQIFKARVVGEMIRKENGIARAIEAIYRDLEYAKSIIKSPPSTDDKTPEKISSLLHPLITADLGVRRVRSRSRSRSSHGRFSPRRHPVDDDGWSVVTGGSRSRSGSASAVASPDRRSLNIGSALGSHVFKAPLLPNPFGKWRSSEGEDDR

SEQ ID NO: 7513 - protein, 439 aa, Thalassospira profundimaris
MHVMLMTYGTRGDVQPFVALGHGLIQKGHRVTLAAPERFAGFITDHDLEFTPLTDAMIALMDDPQFARASDPKASTFQKLRSLLSIGKKARGLQNTLFDDIFRAIDQAKPDVIVFHPKAFGALPIGRHFGIPVVMAQLIPSFLPTGDYPHVGVPDLGLRGASGRWYNRVTGKLVYRVLNATLRRQVCRWAARRQNGINAKSLDIMKSCQSGTLRIIHAFSNAVISRPKDWPTNATVSGYWFLDGAAQTNPPDPALQNFVESQKNLIYIGFGSMPGNDPTAMAEMIAEAVSQAGVSAIVATGWGGMDNINWPANILAVREVPHDWLFPKVDIVIHHGGAGTCAAALRAGRPSIIIPFFGDQPFWAKRLHRLGVAPRPIKPAKLDAAMLARQIKTVLETPSYRNNAERLASKIANEDGITNAIAEITRAAEQSDLPKTGSL

SEQ ID NO: 7514 - protein, 1427 aa, Cordyceps militaris
MYPGSTLLQPTAPTSPTDKLAATKPTQHRPGRPIFDRRLLSPPSISYSIIVMASSPPASVSGGLDHGTRHRSTMRRKAPPSLSSSTPDLPEPLQDSDDSADEAHPQVMATPMSVNMNQSIIGLIAAAGSRVDFHTRFDGNSSDEDDTKDSVSSPPNISQTTVLRPIKKHQKSPSKHRLLKSFATLPRLRPKSKHEPSSLSHAGPSTDDPSQSSDTSDTQALTPTETTAPTARRPSVMSRMLQARAEMSSRPSFDMERKSADLRPSEEDDEATPLARRLMEIFDFSEPEQHIVAKSGYLSKSGKRNPKYNRYWFRLKGDVLSYYRDATNLYFPHGQVDLRFGISASVTDTDKDGLHFEVVTNQRTYNFRADSAPSAKEWVKSLQRVIFRSHNDGDSVKISLPIENIIDVEDIQMVEFSDTCKIRVIDNDETYAIDEYFFSFFSFGQEAINVLKVLVEDSAAKKQRGRDKQIAGTSSQTQAGLDKIYTGKVRDTVKATLSPLSPGRSRAASPRGSVEISSRTSRDGFGGIERSSLDHQRPLTSPLNDRSPRRSFSSSRPRSRHSDGGKTPRTRFFTSDSNLQSEKSSIYDPSFSSMTASGAEDPSASQILHGSDAFQRPTIMRSQPTDQEQPSSLSQTQILHPGSDATFHPARHAATTGHLDQLRQEHEQESRDEERPLTPSLQSITKMGTYPLQRAGAFADYLNKTSKRMSSLLATESMGYVEKVSGMWKGGGKHYDEPAGLRADDDDLEEDSDGKVQTSMDRFRAHFALPDTERLQATYFGYILRVLPLYGKIYISDKSFCFRSLLPGTRTKLILPLKDIETVHKEKGFRFGYSGLVLVIRGHEELFFEFRQSDVRDDCAVTMLQDLEAHRFLEGSDSHADDAPEDDEYIAERDALKRARQEEYPEHELELPHDVSSIPNAPTILLEDTDASFLSFKPSTPLKITCLTIGSRGDVQPYIALCKGLLAEGHKPRIATHAEFQGWVESHGIEFAKVEGDPAELMRLCIENGTFTLAFLREANSTFRGWLDELLDSAYTACEGSDLLIESPSAMAGIHIAEKLGIPYFRAFTMPWTRTRAYPHAFIMPEHKMGGAYNYMTYVMFDNIFWKATAQQVNRWRNKTLGLPNTSLEKMQPNKVPFLYNFSPCVVAPPLDFSDWIRITGYWFLDEGDNYTPPKELADFIQKARDDGKKLVYVGFGSIIVNDPAKMTREVIDAVLKADGWSDRISSKEDPNKKRPDEPEMPPEIHVIKSAPHDWLFKQIDAAAHHGGSGTTGASLRAGLPTIIRPFFGDQYFFGSRVEDLGVGVWVKKWGTNSFGRALWEVTRNERMIIKARVLGEQIRKDHGVDMAIQSIYRDMEYATSLIKRKAGKNGQPEPDEDDEETEESWTFVGGDEPDPDMVTKKLSEGLENLAFERDRALRDVAVSSGA

SEQ ID NO: 7515 - protein, 1453 aa, Pochonia chlamydosporia
MDSFPPMSPSSGGGSRLSTGGEDSGGQRRVSRKLQKKRRDDPSATSLDLPEPLKHGDSDDEDSPNDPASQRGRAMSVNMNQSIFGLIAAAGSRVDFNTRFDDGSSDEEDSENLKSSSGSQDLSQTVILPPRDKDARRGHKKRLSSGHRLLKSLSTLPKRKGKKKEVSRLSAPPLDSSDEAQETVDLATSTVALEKEDNRLAPVMSRMLRARAEVASRPSFDLERKSSDLGGSDDSDEASALAKRLMEIFEFEEPEQVIEEYPCWLLQSVLLQGFLYITAKHICFYAYLPKKAHVVAKSGYLSKSGKRNPKYHRYWFRLKGDVLSYYRDSTNLYFPHGQIDLRFGISANVVDTDKDGLHFNVVTSHRTYNFRADSAPSAKEWVKSLQRVIFRSHNEGDSVKISLPIDNIIDVEETQMMEFSETCKIRVIDNDETYAIDEYFFSFFNFGKEAINVLKILVDGASSNNRTPGKVIAEQELQHLQQPEQHSSSQPSRQISPHPAKAPTHQSIHVDKIRTAKLPESVKATLSPMSPHSANPSPRASMECSSRTSLDAIRHMGRRSHEVSSMIREQSPRRSFSGHRRTQSTRRGDEKKGRHIMESSDSNLQSSTEDPSFSNLTISVATEDPSASQILKGSEVFHSPTMRRSDASSQSTDAKEEELHRESESSIPAESMSMKHAATTGHMGQLGYHGQGMGPRSTTPTLQSITKMGSYPLQRAGAFADYLNKTSKRMSSLLATESMGYVEKVSGMWKGGRKHYGEPAGLRPDEDELEEDSDGKIQTSMERFRAHFALPESEKLQATYFGCIIRVLPLYGKIYISDRSFCFRSLLPGTRTKLILPLKDIETAHKEKGFRLGYSGLTIVIRGHEELFFEFSQVDVRDDCTVTLLQSLETNRYLREAGILHQEDHEEEDQAMAERDALKSARQEDFPQHEILPPQQADSQPNAPTILMDETDGSFLNFKPPQPMKITCLTIGSRGDVQPYIALCKGLLAEGHQPRIATHAEFQGWIESHGIEFAKVEGDPGELMRLCIENGTFTISFLREANSAFRGWLDELLDSAYQACLGSELLIESPSAMAGIHIAEKLGIPYFRAFTMPWTRTRAYPHAFIMPEHKMGGAYNYMTYVMFDNIFWKATAQQVNRWRNKTLGLPNTSLEKMQPNKVPFLYNFSPSVVAPPLDFSDWIRVTGYWFLDEGGEYEPPKELSDFIKRAKDDGKKLVYVGFGSIIVNDPAQMTQEVIDAVLKADVRCILSKGWSDRISPKDDPAKPRPDEPEMPPEIFVIKSAPHDWLFRQIDAAAHHGGSGTTGASLRAGIPTIIRPFFGDQFFFASRVEDLGVGVGLRRWGANSFGRALWQVTRNERMIVKARVLGEQIRKDKGVDTAIQNIYRDLEYAKSLIKRKAKQNGQPDAEEDEDTEESWTFVGTDEPDPDMVTKKLSEGLGGLSPQRSLGSQAIKASS

SEQ ID NO: 7516 - protein, 850 aa, Rhizoctonia solani
MQPNQRDSSYAPSRGYQRYNSYHDLPVPSSAPGSVYNSPNTPSRSFESLAQATIQPPPPPLYTRYDYGSQAGPSAPRPSMHSYSSSSSQISTLEKDHPTLPGYTQLDTKTVVSEDGRLNISFGNRMSKALPESYGAPVHEEGIDETGFRSAPRMNINIMIVGSRGDVQPYLALGKQLQQYGHNVRLSTHETFRKMVKDAGLRFYNIGGDPHELMSYMVRNPGLIPGIESLKNGDIGKKQKMVGEILEGCFASCFAPDYGSGEDTGFAADAIISNPPTFAHIHCAEALGIPLLLSFTMPWCPTASSPHPLVNIKQSGSTEPRMANYYSYGLVDLMTWQGLGRTINKFRMKRLGLEYLSTTSAVGMLERCAVPWTYCLSPALVPKPSDWMSHIDVVGFYFLDLASDYAPPANLVEFLKSGEPPVYIGFGSIVLQNPQEMTKAILAGIAQAGVRAIISPGWGGLDEDLIRSAGPHVFALGNVPHDWLFQHVSAVCHHGGAGTTAIGLRCGKPTIIVPFFGDQPWWAVQIARRGAGPPPLDSKSLTAAGFAAALRMALSPATLESAQVVGAMIRQENGAQNGVDSFHRHMPLLNMRCDLDPTRVAVWYSPAHNMRMSAFAAQVLSESGYIDINQLKLHRSREYVTQIDAFDPVSGTLSPAMKLLGDFGRGVSKLPTRPDKGMAQIVVAGTFGATSTLKGTADGFANLPKLYGGQVRERKKVNGVGSGLVEGTKSLIFGAYDGVNDLFREPVRGYKENGILGAAAGVGKGTLSATTKPLAGVLQFISQPLEGTAKDVRSLFRKEVGKERIAARYAEGGLLARRASEKEKQAVIQAFMERGCTVRVAGKGKAKLAW

SEQ ID NO: 7517 - protein, 1229 aa, Coprinellus micaceus
MPSDDSPFISPPSPPLRPSLSPFRGDGSMRAGTQTLIQALQALPWMASDDDEGPGDVQSEPESEEERPGFNRLSSSIHAIYRPLARSKRMDTSLFVKDNRSASPVAEEEDASEDPSVSEDEIEPDFDNTPRPSHASTGHVRQHSQDTSLSLRPNSERQGSASTMHSHHRRERLADKLREIFELEGIHEKCLVGCCDRSGYMYLTDNYLCFFAHMPTREDQVLKSGSLSKRAQRTKRWVKHWFVLKNDALSWYQSSSDPYFPHGIVDLRYAVTCEPYGDKEFRLRTHQKTVHLSADSVPSRDEWVKAIKKVIFKAQNLGDTVRIAIPYSVILDVERSSAMDFSETIEVKVVDKEDQFSVDSYFFAYFHDLVAALEQIREAVRAHRSLPDQQIEHPLLDTTSTRTATGATLERTTGTLSTDAVAPKPSTSGFRLASLLRPFSDTISLHRTVSVPVDPHVMNQDDYTLVSQRGGSSFVPFTTSPKPFEQSTPPTSTKEQFEFKSKPSTNSLPTPTTAEHTYPPSTSTASSIDPNLLSLTRESTSSWSVGVPSWLKNKRMFGATTSYPPSTATESSTEVVKEVYSSPASASVSQSRFGTGDLAFSILETPNMPVDVETTEKFRAYFAYDERETLLGYFPGYIYRLLPVYGRLYVSTNYFCFKSTGALASRTRMTLPIKDILSLEKSKATRFGHHGLVIMVKGHEELFFEFGAPDKRDAFVRLLERQMEDVRLRLALQNPELPSPGTKAALTLESLEPSKGDETDDEDPAPPPDNAADDLPAVMFTSASSTFLTFKPHKPLHFTFLTIGSRGDVQPYIALSKGLMADGHKCRIATHGEFKEWIEAQGIEFGFVGGDPAELMRICVENGMFTVSFLKETLQKFRGWLDDLLKTSWEACQGTDVLVESPSAMGGYHIAEALGIPYFRAFTMTWTRTRAYPHAFAVPERKMGGGYNYMSYVMFDQVFWRAIAGQINRWRRDFLHLGPTSLDRMEPHKIPFLYNFSPTVVPPPLDWPEWIRVTGYWFLDDADVSAKKWTPPDALVEFIDNAHAQGKKVVYIGFGSIVVSDPKTMTRCVIEAVVQSGVYAILSKGWSDRLHVKVNDAAEPEEPLPPQIYPISSVPHDWLFKRIDAACHHGGAGTTGASLRAGIPTIIRPFFGDQFFWADRVEALGVGSGVRKLTVATLKDALLKATTDQKTVDRARLVGEQIRAVHLLFFRVYFVILTTPCRRMVSQLP

SEQ ID NO: 7518 - protein, 810 aa, Aspergillus fumigatus
MGRPETRAEPSENDGPPPYSALDEGLVGESADVRADGRVDVDLNSRIARTLAQIIELQQEDIHNPPPDYQQELQQQRDQDQDHQLEPIECSIHLNIVIQIVGSRGDVQPFIALGTELQKHGHRVRLATHDVFADFVRSSGLEFYPIGGDPAELMAFMVKNPGLLPQMDSLRGGEIQKKRAMVATMLDGCWRSCIDDDPLTKAPFVADAIIANPPSFAHVHCAQALRVPVHLMFTMPWSSTTAFPHPLANLRPSDMSPRTAHWVSYGVVEWLTWQGLGDVINRWRATIDLEPVPMAEAPSLAETLKIPFTYCWSPALVPKPRDWAEHIDVCGFFFRQPPSYQPPPDLEQFLASGPPPVYIGFGSIVVDSPQRLSNTVLQAVAASGVRAIVSRGWSKLAGDGNPNIYFIGDCPHEWLFQHVSAVVHHGGAGTTACGLANGKPTVVVPFFGDQQFWGNMIARAGAGPSPIPHATLSVRNLAEAIRFCLKPQTVAAAREIAAKMQFESGVTAAVQSFHRHLPLEQMRCQVFPDQVSVWKYARHKREIRLSRKAVQILIDHLKIDPKNLRCYDIKPIIIENRRWDPLTGVTSAAVGTGTDLLKSTTNMFYKPYKELARNKTDVAPDGAERHPVVTVGAMAGQFAKSFGQFMGSYAKGVIVDIPHAAAEGFRQVPRLYGEQPKVYGAVQDWKSGATVGGKNFVDGMMEGFSGLVTQPIKGGKEEGALGVVKGLAKGTAGLVTKVPSAGLGLVAYPFQGIVKSIESSVRSKTRKAIITARLRDGYELSRREEVSQEERRFVLQKFQSLLCGPTATPT

SEQ ID NO: 7519 - protein, 424 aa, Rhodopirellula islandica
MRILVLTVGTRGDVQPYVALAGGLKEAGHVVQICTCQVFEGFIRSHGIDYAPLNNDLRDFMESDEGRSAMETTTNLFQMVRAGIRLMPKLTDMMHRQVNEMWTAAEAFEPDLILFHKKAIGAEDFAERLGCRCALAFYLPLYVPTGESPAFGFPRLPLGRWYNRATYRLIEFISRRSGARFVGKWRRSQGMTAKRPAYFRHAGGSPVAALHAYSPSVIPRPCDWPDHATVTGYWFLDASTEFIPDPTLVKFLQQGPPPIYVGFGSIFGRDPRATAERVIEAVRLSGQRALLAAGWGGMDLNKFDLPETMLSIDAVPHDWLFPQVSAVVHHGGCGTTAAGLRAGRRTIICPFFGDQPFWGRVVQDLGVGPQPIPQRKLTPKRLANAISQTMEDREMEVRADQLGKPIRSESGVQNAVRFIDELSV

SEQ ID NO: 7520 - protein, 1408 aa, Mixia osmundae
MSEAQQDTTSTSVSPTSRPPRHVPAREDSVQETEPAEGASAAQRASITRSISSQGGSGSILGMISAFGHQQQDMGEDADADTSDDEARPASTRPARPRRQSTIRPTPSSSLRASDIGSDDAEESAVVAQASRILPMRHPGSKQQDWAAHNSPRARVQESGDDAHTTTDDEAVKPGMRELLGERRQRSSSAAGPSAPTTSPSIPSESPRSPADQALAVSLDEASEGINDQMRVSPRSEEDRKTLLAEKVKEVFGLPTVEPLTHELSCWLYREILIQGYMYLTASHACFYAHMPRRYGQVLRSGSLTKRSSKTRRYSRHWFILRNSVFSWYSSSTDPYFPEDAIDLEYCTSVESSLNHSTHFKVAIRDRRYHFAADSRANRDEWVKILRKAVFRTQHKGESVKIIIPASAIDQVTRQKPLDFAETIQIEVREQISKEHATLQFAYFADLDLAMEALRFLSESAPATQSQLIDTTTTVHPTEPTGMTDTEDDSDFGESRGNSRNISKKSSLSALAGHIKPGADHSSDMTGGRSSADLSDHDSLSRIRSADSQTTLSEKTRRTRKAQKLPQLAKDDSTHTYPPSSPHSRANPLSPDSSDSWSLTSVLKRPAKTLSGTFGSKRNQSASSEAFSPDSLSPSHSFSQKQDDQSYSFVLDKDAIVDDERAHRSSVEAEVHADFRKFFKVAGERVIESHSGWLARALPVYGRVFVSTHFVCFRADLISSTKMVLPLTDVIAVQKHRAYRPGYSSLVIVVKGHEEIFFEFGSSSTRDRMLRSIEGRAEYLQDLEEHPRTNEDILPSTREAEMLKDLEPRAGKNEPLPPPETSAESVPPLMFRSTSSTFLNFRPHKSLHFTCLTIGSRGDVQPYIALCKGLIAEGHTCRIASHGEYRKWVESFGIEFGEIGGDPAELMKLCVDHGMFTVSFIREGLVKFKGWLDDLLKTSYEACKGTDVLIESPSAMAGLHIAECLQIPYFRAFTMPWTRTRAYPHAFAVPDTHMGGSYNWMTYTLFDSVFWKAISGQVNSWRKHTLGLRSTSADRMRQQCVPFLYNFSPSIVPVPLDWPEYIHITGYWYLDNADDSGGVDEWTPPDDLVAFLDRAKQEHKKVVYIGFGSIVVSDPDALTKTIVEAVNKSDVYAVLSKGWSDRGSKKSATGQDDKASGDKKDKAMMSNTIFNIKSCPHDWLFARVNAACHHGGAGTCGASFRAGIPTIIRPFFGDQHFWADRVDALGIGTALKKLTVDSLSDALIKATIDEKQIARARMVGQNIRKENGVANAIEAIYRDLEYAKDLIASIKTKRVEPEILDTTTDEEHDSLPRTTTEKVEAIVSGNASDPSDESSWDLVHDQQDQDEPDTGGQASKGGIATLTGPMRKLLQRANDDSSDKPGALSKVGSGLFDALPFGRNDAVVKATD

SEQ ID NO: 7521 - protein, 1470 aa, Metarhizium album
MDSFAPLSPNGGDASPQSAGAGAGAGAGAGAGAGAGAGAAHDGVQRRVIRKLCKKNRDDPSATLLDLPEPLKHCDSDDEDSPNDPASQRGRAMSVNMNQSIFGLIAAAGSRVDFNTRFDDGSSDDEDSEQSKSSSGSQPLSQTIILPPRDKDARRGHHKRLSSGHRLLKSLSTLPKRKSKRREASRLSAPLMDSSDEARESTELSASAIAPHQEDSRLAPVMSRMLQARAEVASRPSFDMERRSSDLARSRDGDESSALAKRLMEIFEFDEPEQVIEEYPCWLLQSVLLQGFLYITSKHICFYAYLPKKAHVVAKSGYLTKSGKRNPKYHRYWFRLKGDVLSYYRDSTNLYFPHGQIDLRFGISASTVDKDKDSLQFNVVTSHRTYNFKADSAPSAKEWVKSLQRVIFRSHNEGDSVKISLPIDNVIDIEETQMMEFSETCKIRVVDNDETYAIDEYFFSFFNLGKEAINVLKILVDDASSTQRTPGKLIAEQELQKQDQPEQNPNSQPSPSISQQPAKLTSRQTIVVDKIRTTKLPEAVKATLSPMSPPANSSPQVSMECSSRTSLDAVRCKGRRSQEVSNMISEQSTRRSFSGHRRAQNARQSEDKKGRHVMEYSDSNLQSSTEDPSFSNLVMSLPTEDPSASQILKGSEVFHSPTMRRSDASSQSTDPREEELSKNSEKFLSDASAPMKHAATTGHVSQFGYHGQAEQAGSTTPTLQSITKIGSYPLQRAGAFADYLNKTSKRMSSLLATESMGYVEKVSGMWKGGRKHYGEPAELRTDEDDIEEDSEGKTQTSMDRFRAHFALPESEKLQATYFGCIIRVLPLYGKIYISDRSFCFRSLLPGTRTKLILPLRDIETAHKEKGFRIGYSGLTVVIRGHEEVFFEFSQPDVRDDCTVTLLQSLETNRYLREAGLLNQEEHEEQHQAMAERDALKSARQEDFPQHEILPPQQADSQPNAPTILMDETDGSFLNFKPPQPMRITCLTIGSRGDVQPYIALCKGLLTEGHQPRIATHAEFQDWIESHGIEFAKVEGDPGELMRLCIENGTFTISFLREANSAFRGWLDELLDSAYQACLGSELLIESPSAMAGIHIAEKLGIPYFRAFTMPWTRTRAYPHAFIMPEHKMGGAYNYMTYVMFDNIFWKATAQQINRWRNKTLGLPNTSLEKMQPNKVPFLYNFSPSVVAPPLDFSDWIRVTGYWFLDEGGEYKPPRELSDFIQKARDDGKKLVYVGFGSIIVNDPVKMTQEVIDAVLKADVRCILSKGWSDRISSKDDPAKPRPDEPEMPAEIFVIKSAPHDWLFRQIDAAAHHGGSGTTGASLRAGIPTIIRPFFGDQFFFATRVEDLGVGIGLRRWGANSFGRALWQATRNERMITKARVLGEQIRKDKGVDTAIQNIYRDLEYAKSLIKRKVGHNEQPDADDDEDTEESWTFVGADEPDPDMVTKKLSEGLGFFGKQRSLGSQAIKASS

SEQ ID NO: 7522 - protein, 1396 aa, Nannochloropsis salina
MMSSCSPSPPSPEEDELAPPATEESRTALPLTMCPPAPTIYRNIGVEESPSRRDRSGSTASSKGEGLGITEGAQPRADAPLTPTPQRPELPLSSVAPASPVGSAAGGTGSADKEDAPSLTRTAAGCQDPGLTPVGPDEGDGGVLSDGNACRPSRGQSAEGQDDGLETYLALSEEGSSGSREDEEDDFVRVEPEMHRGHVEVRVLKEGWLQKQCLRVVDGRPSMWRHFAFWKQRYFVLGSDGVLRYYKDAERQHFRRAIPLAGMEVTAHFYAPADPGEGGETAALCAWEGEGTSLSVLAAAVGSAEGEKGGKCLIIRPKQVPFPSRRRASSTGGQTEGASVEEEMKLLATSKAEMQEWLGALRGELEATERQGQTLFNTAWSLLRSYIDRPQGEARTPGGGEEVGLGARGIREADVGPPPMDLQHRSSSLSPSSGLPMSGSESAAPMADVSFVPPSVPIPRMKVVMMVVGTRGDVQPFVTLGLALQAQGHRVRLATHAMYRPLVVEEAGLEFYPLGGDPLKLSAYMVKTAGRVFPFKLPDHQEMTKDVPEQRAMLSEIILSTWPACTAPDPEDPLKRGFRADAIISNPPVYGHVHCAEALNVPLHIMFPQPWSPTKAFPHPLSGLPYHGHWCKENYYSYLVVDKFLWLGIQDIVNELRVARLGLPPLRLGEHGGDLLNRYRVPFAKMWSPCLVPKPKDWGPHIDVVGHFLGPQTSGTPPGAEALQAWLEPTAPGLPAPPAPIFVGFGSMVIPDARSLVAMILEAAHLTDTRVVLQSSWTELPLPPVAVALPSATPSTPTVFSIGNCPHDWLLKRCCAVIHHGGAGTVAAGLRAGKPTMVCPFFGDQFFWGQMVFQARVGLPPVPVVELTAEKLATAFKDLRSPSLVSAAERMAERLGREDGAKEGLKAFYRHLPVEDMVCDVSLFTDTPRLARAFCTTCGLKLSSEAHAALHCAGPRTESGGDGPAHADHDVRAYSAMDWASLSGPRDATEGLVQGLSSLTHEFLGSMAGVVTEPVAGAHKTGVRGAAQGLASGLVNLVRRPIRGGIIFVDKVTTGVSNQLQLQQSSHGVGMASSLSPSFSSLGSQGEGKGQDNEAGVWQDNLSISCELVKELRAAHAQALQCKALFMRLSKGDPRCVPKEGVLNLLEEVQTEVRECDMSDESGRYSVFGMCGAQEEAEERKVLSRALLERIDAVGAGQISFQQFCVFFKALRRGALMQPSTREPGTVSIASEATAERRHAPAVALTETPEPTKMEGVPGESKPSSVAVAMVGGPTAEGENCKKSKLLDSLIFDSIFLEERSSAPLPQPSSNCLRLSLDCDQVELGENCEERSGAERKEHDQVPDDDGGSSASSASSGIMEDVEIQVDVLRRDNESSKSGDADYLGEEEDKGPKACP

SEQ ID NO: 7523 - protein, 1411 aa, Trichoderma virens
MATTPTPRRISLDGQDHVELPQTSTTHDDPTPTAELPEPLQGSDDETSENADLHKPSHMAVNMNQSIFGLIAAAGSRVDFNTRFDDGSSDEDEGGSLKPPSARHRDLSQTAIFGSLPPRDKRLGRGKQVPGHRMLKSFASLPKRKSRSGTGSSRLWEPTQEVDEQSEPSEPSSPKIPSQQPDEDVRIAPVMSRMLEAKAEMASRSSFDIERDSSGPDRTDEGEAEDEAEDDEDEDGEDATALAKKLMEIFKFDEPERVIEEYPCWLLHSVLLQGYLYITSKHICFYAYLPKKTHAVTKSGYLSKSGKRNPKYNRYWFRLKGDVLSYYQDATNLYFPHGHIDLSFGISASITDEDKEGVHFSVVTSHRTYNFRAESAPSAKEWVKSLQRVIFRSHNDGDSVKISLPIENIIDVEDTQMMDFSDTCKIRVIDSDETFAIDEHFFSFFTVGKEAINVIKLLVENASAEGPTAGKVIAAQEGESSDQSSSPHISGGAFRNLARVDSALTTKFLSTAQEVVSSASPKSTSPSPHPSADEEGVLSLKSSRGRGSSDDRRLEGDRHAEERTSSRIMESSESNMYSSIEEPSFASLTQSAFEDPSASQILRGSDVFQSPTMRHSQTSSRDYNEFKDKAPESKQGQQGSAAASQSEGSVYTGSAEPPRTSTPTLQSITKMGAYPLQRAGAFADYLNKTGKRMSTLFATESMGYVEKVSGMWKGERKHYDEPAGLRPDEDELEEDDDGQIKTSNERFRAHFALPDTERLQATYFGYIMRVLPLYGKIYLSGRYFCFRSLLPGTRTKLILPLKDIENAHKEKGFRFGYSGLVVVIRGHEELFFEFRQAEIRDDCAVTLLQCLETDRNLQESGILEQHYKHEASAAAAERDALKLATGDVFADRELQLAQSTASLSQAPNILGDDMETSVIQFKSPHPMRITCLTIGSRGDVQPYIALCKGLLKEGHKPRIATHAEFQGWIESHGIEFACVEGDPGELMRLCIENGTFTLSFLREANATFRGWLDDLLDSAYKACEGSELLIESPSAMAGIHIAEKLGIPYFRAFTMPWTRTRAYPHAFIMPENKMGGAYNYMTYVMFDNIFWKATAHQVNRWRNKTLGLPNTGLEKMQPNKVPFLYNFSPSVVAPPLDFSDWVRVTGYWFLDEGGDYKPPQELQEFISKARADGKKIVYVGFGSIIVNDPAKMTQEVIDAILKADVRCILSKGWSDRITTGRDEPTGPPMAEPVMPPEIHVIKSAPHDWLFRQIDAAAHHGGSGTTGASLRAGIPTIIRPFFGDQFFFASRVEDLGVGVWVKKWGTKSFGRALWEVTRNERMIVKARLLGEQIRKESGVETAIQSIYRDMEYAKSLIKHTDGHLETEEDEDTEESWTFVRGDEPDPDVITTKLSEGLDGVALGNNSKASGKA

SEQ ID NO: 7524 - protein, 1437 aa, Hirsutella minnesotensis
MAFPPPPPAGGHDDVQARVSHKLQKRRRPEPPAVDFPEPLRQSDSSDADEDAHHRDDQPSPLAYVSKRPTPMSINMNQSIFSVIAAAGSRIDFNGRFDDASSDDDAPDEAHQPPKPQDLSQTAILDPSAPREATRRSHKKKLSGHRLLKSISTLPRRRAKSKAKRESSHSSAPMVSHDSSDEPSSPPPPAIVDAENSRAAPVMSRMLQARAELSTRSSFDLDRRSADMARADGDDSTPLAKRLKEIFDFEEAEQVIEEYPCWLLQSVLLQGFLYITAKHICFYAYLPKKANVVAKSGYLSKSGKRNPKYNRYWFRLKGDVLSYYRDPTNLYFPHGQIDLRFGISASIVDRDKDGVHFDVVTSQRTYNFRADSTPSAKEWVKSLQRVIFRSHNDGDSVKISLPIENVIDVEETQMMEFSDTCKIRVIDNDETYAIDEYFFSFFSFGREAINVLKILVEDASTGRQTAGKAIAEQQGLNEPDASLPPTSPEDLKRNGNSDEICTTKLPEPVKATLAPLSPPSNNPSPRASHDVLSRPSHDAPRQTGRRSHESSGVSREPSPRRSFSRSRRSQSRRRLDQSTPNIMESSESNLHYSTDDPSYSNLTISIHDDPSASQILRGSEVFQSPTMRRSPSSSQSIETQNQASRDSRQQIQSPPLVNHAATTGHLAQSSARGSLEQLRPSTPTLNSITKMGAYPLQRAGAFAGYLNKTGKRMSTLLATESMGYVEKVSGMWKGGRKHYDAPAGLRPDEDDLEEDSEGKIQTSMERFRAHFALPEGERLQATYFGYILRVLPLYGKIYISDRSFCFRSLLPGTRTKLILPLKDIETAHKEKGFRFGYSGLVLVIRGHEELFFEFGQSDARDDCAVTLLQSLESSRFLRESGILEEEQREEEESAMAERDALKSARQGEFPEHDVQLPRQASGLPNAPTILSDETDGSFINFKPQHSMKITCLTIGSRGDVQPYIALCKGLLAEGHKPRIATHAEFQGWIESHGIEFARVEGDPGELMRLCIENGTFTLAFLREANATFRGWLDELLDSAYHACEGSELLIESPSAMAGIHIAEKLGIPYFRAFTMPWTRTRAYPHAFIMPEHKMGGAYNYMTYVMFDNIFWKATAYQVNRWRNKTLGLPNTSLEKMQPNKVPFLYNFSPSVVAPPLDFSDWIRVTGYWFLDEGSEYEPPKELHDFIKKARQDGKKLVYVGFGSIIVNNPAKMTQEVIDAVHKADVRCILSKGWSDRISPKDDPAKPRADEPEMPPEIFVIKSAPHDWLFNQIDAAAHHGGSGTTGASLRAGVPTIIRPFFGDQFFFASRVEDLGVGVWVKKWGTNSFGRALWEVTRNERMIVKARVLGEQIRQEQGVEHAIQSIYRDLEYARSLVKCKTGKNAQLENEDEDEDETEESWTFVGADEPDPEVMTKKLSEGLGGVSGKSLGSQAIKGNA

SEQ ID NO: 7525 - protein, 408 aa, Kribbella sp.
MRFVLASWGSRGDVEPLAGLAVALQELGAEATVCAPPDEDFEALLERAGVPMVPLGPSVRSVVTAPKPATGHPAFALAPRLVAARFETLSAVAPGCEAIVATGLMPAGARDVADKLGIGYVLAAFHLGGIPSQHFSPGARPGTPSPVDETDRRVLWQHDAQRVNELYGSALNSRRAAIGLPPVENVRDYVFTDHPWLAADPTLCPSKGMTDLDVVQTGAWILPDDRPLPDELQAFLEAGEPPVYVGFGSMAAHAPKDIAQTATEACRAHGRRVLLSRGWGDLAGDGEDCFTVGEVNQQALFPRVAAVVHHGGAGTTTTAARAGAPQLVVPLIADQPYWASRVTALGIGAAHEGSVPTVGSLSAALATALAPQTRDQAAKVRDAVKVDGATVAAKLLLDGAARGQSTGR

SEQ ID NO: 7526 - protein, 823 aa, Talaromyces islandicus
MEDQPPRYSMLEAAGWPDDSWLQNGRNVNDDGRIEVDLDSKVCRTVANLIPIPHEVQGPASVADCTEPVTCDVQLNIVIQVVGSRGDVQPFIALGNELQLYGHRVRLATHSVFESFVLQAGLEFYPIGGDPSELMAYMVKNPGLIPQMKSLRSGEIQRKRAMVAEMLQGCWDSCICDDPVSQAPFVADAIIANPPSFAHVHCAQALSIPLHLMFTMPWSSTSAFPHPLANLKYSTTEPKMANYISYGVVEWMTWQGLGDVINEWRSSLSLEPIPGTEGPCLAETLKVPFTYCWSPSLMPRPSDWASNIDVCGFFFRAPPDYTPPPDLDSFLRKGSPPVYIGFGSIVIEDPIAMTNMILQAVKSIGIRVIISRGWSNIGEASSDDQVFYLGDCPHEWLFQHVTAVVHHGGAGTTACGLRFGRATTIVPFFGDQLFWGNLVASCGLGPRPIPYQSLTSQNLAEAIQFCLRPEAQSAAHDVASRMSHENGVAAAVASFHRNLPLNDMRCDALPSQSAVWQLENPSKPPIHLSKIAAEVLIQHHRLKCSDLQPYFVNPISIQNRRWDPVTGTASSLIGTGTDMLKATGGIVYKPYQEFRRAPKSQPELAVPSPSGSRSPSVASSGNVSSLLASGVNESSRLRTTGVAMEGAAKSLGKVIGYFYKGMLVDMPLAATEGLRAVPRLYGDEVKDHGTVRDWKSGATLAGKNFVHGMADGFSDIFTQPYKGGQEEGAKGVMKGLAKGTLGATTKVSSAALGLVAYPAHGIMKSLYTITHSKTQKRILQARIQEGKYLAEHSDKGQKHYRTIIRNFETAYRKNFGNTVDSTS

SEQ ID NO: 7527 - protein, 419 aa, Clostridium beijerinckii
MRVVFLTLGSRGDVQPYVALAKELIKTGHESIICTGATFKNFVQENGVEFYKAESDLMAILESDEGREIFNGGRYNIFKMLKYAKEVINPAYRKSMDDFFAASKGCNLIIYHPKALGAVDIAEYLNIPCICMPPVPIIYPVTEFPNLAISPSKNFGPFINKLTYKVNSFGEASYMKYINDFRSKSLHLKNRKAGELLFQVNGKDIPVVYPISPFLFKEVKSWKDRVLISGFFFLDIGESRIDENLYEFLENGKKPIVVSFSSMPLKKPMVFKEKLIRALKETNNRAIVLIGSSGMRFENQENIFEVEKVPHRLIFSKAKGIIHHGGIGTTAEALLSGVPQLIIPFTVDQPFWAHRLFSKGYSVGTLKEKNLESFDLIKAFKDMENKEYIRNAKEIKNIIESEKGLENAVKYIEKVYKSF

SEQ ID NO: 7528 - protein, 664 aa, Cephalotus follicularis
MQKALSFCSSCAFDEMGSNGVNDGFREEGKFICSSQEVHKELEQNDGISEFKFSEEQSDLSSSQGAGNEETNSRRSSSLPQICQLKELSVASSPRRGFDHCTTVPIGTHVDPLIDKHEITFSRSMTEKKTVPRHDLKLDRLTDREKKKLIVNLVKIQNDGTVEVDLDKSSPAASELFELHSVEGEQFSVNDSFFSEATKSIPRLKIAMLVVGTRGDVQPFVAIAKRLQEFGHHVRLATHANFSTFVKSAGVDFYPLGGDPRVLAGYMARNKGFIPSGPGEISIQRKQLKAIIESLLPACTEPDMETGEPFRAQAIIANPPAYGHAHVAEALGVPLQMFFTMPWTPTYEFPHPLARVPQSAGYWLSYIVVDLLIWWGIRSYINDFRKKKLKLPPIAYFSTYHGSISHLPTGYMWSPHLVPKPKDWGPLVDVVGYCFLNLGSKYQPKEEFVQWIQKGSEPVYIGFGSMPLEDPKKTTDIILEALKDSGQRGIIDRGWGDLGNITEAPPNVFLLEDCPHDWLFPQCSAVIHHGGAGTTATGLKAGCPTTIVPFFGDQFFWADRVHQIGLGPTPIPISQLSVENLSSAIRFMLQPEVRLQAMELAKLIENEDGVAAAVDAFHRHLPPELPISTVSSEDDDHPNPLQWFFLQIGKLCCLPCGSFWEMGN

SEQ ID NO: 7529 - protein, 416 aa, Kutzneria albida
MKVVIMAIGSRGDIAPYTGLAASLRERGHDVAIATQEPFADMARECGAEYRHLSGDMKAELASEDGRKWTENGTGLRNLRATLAIGKRMMHSLGESTLAAAEGADVLMLQRGVMVHGYLIAKATGVPAMGLELFPGMPTAEFPPPMFGTRSLGRWANRELVRLAAPLPTPIDGVLKEFQRKLGLPELGLTRTRFQMLDDENFLMPHGFSPAVLPRPADWRRGADVVGYWWSYQDPNWQPPTELVDFLDAGPAPVFIGFGSMATGEGERLSELISATLRRLPGVRAVVQAGWAGMRVAGDEVLTIGSVPHGWLFPRMAAVVHHGGAGTTGAGVRAGVPAVLTPVLGDQPFWAARLRAIGVSPGSVLFKKLTAESLSELIRQAVTDPGYAARAAEVGARVRAEDGAARVAEALERIPA

SEQ ID NO: 7530 - protein, 1585 aa, Debaryomyces fabryi
MLPKEDRFNSKNSKGTNEAENQATSFYKRFSSSIIPPLSFLSQGTISPNNEEVANDDNAHKDEKTFSDDEDIAHPIGSVGSLNNFVSFLYAGMGKLSEIKGNDASNANDTNDASDVGALKLNDKFTEARNRQVNEPYRGEYKIDYDINESEEGDVESAEDENTLKPKTEDVTPNTGLDPEEHLEKVSDMFFDDKDEPTTALASDPSKGTVLQQSVLKNFDPFLIEQTELLKLKDIKLSTDEDESDAYKIKKKFFRLKVADKLKRVFELSDDDYFYGNYSVWLVRDVLLQGHIYLTKESILFFTFLPKRQNTINASNGAAGGFQHHDDSHDVIQSGSLGMKTALYGDTVFSTPLTHRFWVILRNETITVYNSPTDLYFPITLIDLKSCISAEVIEKGKNESSTSSRPELCRNDSLENSSGDEEAEFSNMLHSNYQLEDNTENLSGGFWFKVVTKKKTHKFHSDSLYSARQWVNNIVKVVFQLHNSNSNNEVIMKIPINNIISFDINEVFGASERTSESNDEKPKVLNVKHIENEAKARNPLLASRMKNELKNKTRKKMKRTSVGEADDLLSENTYFLLFKNGDEVFNTLNEIVSENKDANTFPNKRSSIISTFNNEKGSSWTRPKSFAHRGEEIKTPRAISTLTTDHYQNSIIDQIEEASHRKTANAELASPRSECGLTNSVLSLPQSKIKKFGKTLIAPSRIFSNKSRSGSEKSTPDRSGTTSPVQGINLSLSGLKDLNMAFEASQKNYEVGSTRFSHTDNNNADNISSFEYNTLSKAEALSPQIRSPHPIEAGPLNLTDPSEFEDNRKKNNTLSSIGKSIKAMSSIKSKLAAVNHYEELYENDPYFIRDISAREVDTKHFQERFSFNNKKQLIASYHCHIIRAVPVFGKVYLGDSEICFRSMLPGVSTKMILPLIDVDTCYEEKGSNIAYSGLVIVIRGYDELLMEFSVQKARDDCLAMILRQLEKNHGPGDESSSNNKNSEDDDQCLQKLPSSTDTTKSLAGIKLAQWRIENARLKLFEDKINAAAGLHVPIILEDSPFYKTEIRPSTSFNFTLLTIGSRGDVQPYIALAKGLLAEGHNVTIATHSDFEEWIIGHGIKFKTIAGNPVELMSLMVSHGSMSLSFLKEASSKFRGWIQDLLDTSWKACQGSDILIESPSAMVGAHIAEALGIPYMRAFTMPWTRTRAYPHAFIVPDKKKGGSYNYITHLMFETVLWKGISGQVNKWRREQLGIPRTNLYRLAQYDIPFLYNISPIIFPPSVDFPDWVKVTGYWFLDEGSAEDFNPPKELVDFMNNAKEDSKKIVYIGFGSIVVKDAKSLTKAIVEAVLEADVRCILNKGWSDRKSSPKKDDAEPEIELPEEIYNSGSIPHDWLFPKIDAAVHHGGSGTTGATMRAGIPTIIKPFFGDQFFYSSRIEDIGAGIGLKKLNAHSLSTALKKATSDAKMNLKAKKISERLKQENGVLNAIEAIYYELEYARNLITAKQHENAKHDIKSGVQTPVVNETLDEYFDSDAYDTDFESDHESPNETYQQDNDEDYNTNDDNTTEIEEPSLMDDNDTVRIAPDTGNDTTTLTDVNKEVFNVSAS

SEQ ID NO: 7531 - protein, 1514 aa, Colletotrichum higginsianum
MATPGPAGAATVSFGGEDDVKRRVGKKLQKKRHEPNNTPAMELPERLKDGDDSRDEDLVPTQGPPMFMNMNQSIFGLIAAAGSRVDFHDRFESSDEESADDDDDRRPDHAAAADKAPGLGHFLHRKQRRHNNESDISKTTVLKKDSSSKSEKHRRKISGSKLLRSLPALPRLPRHKSKKEKSKLGQQQQEMESSSHQAPSDASEAYSTQRTDGIREENEGEEDDEEDDDDDDDGDHRLAPVMSRMLEAKAEMSARPSFDVDRRSADQLTYSDSAESNATALARRLQDIFEFDHPEVVIEEYPCWLLQSVLLQGYMYITAKHICFYAYLPKKAHEVVKSGYLSKSGKRNPKYNRYWFRLKGDVLAYYKDPSNVYFPSGQIDLRYGISASVNDKKDGLGFTVVTHHRTYHFKADSAPSAKEWVKSLQRVIFRSHNEGDSVKISLPIENVIDIEDTQMLEFADTCKIRVIDNDETYAIDEYFFSFFSFGKDAINVLKILIEDASSNARDTAKLKAAAAAAASQQQQQQQQQQQHEEEKQPVTASARSSMSASRRAAAPLKLRTSKLPDAVKATLSPLSAQAHSPSALSPRASMDAARSSFDAFRGFRRRSLDLSTIIRDSSPRRSFSGNRRSMSRNRLDDSRHAPHHQDHQGSTDSYVQSSMEDPSYSGMVASSSEDPSASQILRGSDVFQNPTMRRSTSISRTDQDKSQRSRGQRTPPSLAAYSRQHAATTGSINDGDKPPATPTLQSITKMGAFPLQRVGAFAEYLNSTSSKLGSMLATESMGYVEKVSGMWRGGRKHYDAPPEIKTDDEDLYEDAEGKIQTSMDRFRAHFALPETEKLQATYFGYILRVLPLYGKIYISDKSFCFRSLLPGTRTKLILPLKDIENVDKEKGFRFGYSGLVIVIRGHEEVFFEFGQAELRDDCAVTLLQGLETTRYLKETGDLDMEEKEEEENAMAERDALKEARQIEEFHDHELRLPKESSGVSDAPTILFDDPKASFLNFKPPHSMKITCLTIGSRGDVQPYIALCKGLIAEGHRPRIATHGEFKDWIEGHGIEFTKVEGDPGELMRLCIENGTFTWAFLREANSMFRGWLDELLVSAWEACQGSDLLIESPSAMAGIHIAEKLSIPYFRAFTMPWTRTRAYPHAFVMPEYKMGGAYNYMTYVMFDNIFWKATAHQVNRWRNNTLKLPNTSLEKMQPNKVPFLYNFSEYVVAPPLDFSDWIRVTGYWFLDEGSDFQPPQDLTDFIAKARADEKKLVYVGFGSIIVNDTAKMTQEVIDAVLKADVRCILSKGWSDRVAKQDDDAGATGAADAGSKKDEPVMPPEIFVIKSAPHDWLFSQIDAAAHHGGSGTTGASLRAGIPTIIRPFFGDQFFFGARVEDIGVGICLKKWGAVSFARALWEATHNDRMIVKARVLGEQIRGERGVENAIQCIYRDMEYATSLIKRKAGKHAQSEEYDDEEAEESWTFIGNDEPDPDMTTKKLSEMGAPPGLPEPKPLGTRVMRMSPSASQQQVA

SEQ ID NO: 7532 - protein, 432 aa, Cystobacter fuscus
MKLTVLVLGTRGDVQPFIALAIALQRRGHEVRVATSRGFADMVAHSGVRYVPVSADYEEWFQSEEGIRWMAGSDNTAKFMRMLAGEGVGIDSRLKPRMHRELLAACEGTDAIVANLVIEDSAACIAEKLGVPFIPGYTMPMLPTSEFPSPFLSARELPLRAMNRLTHSLLETLYWQGQKRLINAWRAELGLPPTAISMREKLWRAGTPILHCYSSHLVPRPSDWSAANVITGPWMMPPDVRVNAGGVPSPELIRWLDEGPPPIYLGYWRLPSMDKEGMLRLAIEVANTLGVRFAIGASWSAEEIAALRVPASIFITRSVDHDWLFARCSATVHHGGAGTTAATLRAGLPTVICSICNDQPFWGNRVTALGVGYSMPFKQLTAARLTQALRHIQDGAVRDRANRLGELMRREDGTATAVRIIEERLPGAPLLS

SEQ ID NO: 7533 - protein, 1433 aa, Sclerotinia borealis
MAPDEELKKRVSRKLTKRRKEGHQVTMELPERFRDGDDADEDCTAPHGNAYNMNQSVFGMIAAAGSKVDFNARFDAQSSDEEDDSEKPTRQSSESHINESRTDPTTGKVDGHRRKLSESKLVRSFSRMGSRSKSKSSNIARGSRTPSPVGESPQETTTTDIKYPRLQPKDAPVMSRMLDARAELSLRPSFDMPRKSKDLTKLDEDGKPSPDSLAERLMEIFKFQSPEDVIEEYPCWLMKSVLLQGYMYITTKHICFYAYLPKKSNEVVKSGYLSKSGLRNPKYNRYWFRLKGDVLSYYTDPSDLYFPSGNIDLRYGISAMVTDKEKGQDSTHFIVETHQRKFNFKADSAPSAKEWVKALQKIIFRSHNDGDSIKISLPIENIIDIEDSQIVDFADTCKIRIIDNDETYAIDEYFFSFFSYGKEALNVLKLLVEDTTAKKIPEQLLSPLSTTDNSRGSSKRTSIQVGQPHVLPLQTKAPALEEHVRATLSPLLSPGSDSPRTSNDMSGSSSDVYRRSVDLNKHGRRSVDLNPFTMEGRRSTSANSISTRRSLSANRLDREKRTSKQGSSDSYVHSLEEPGSSEAVPSASDETQASASQILRGSDVFLSPTIQRSPSAVYHRNKDDFQSPESRSLASPRKSTDVSPTRTHRPQHAATTGSMNSSNAGQVEISSGPSLQSIVKAGTYPLQRAAGFAGYLNRHSKRMSTLLATESMGYVEKVSGMWKGGKKHYDEPHGMPRDNETSGIRDDDDNKDGATPANRFREHFALPFDEKLHAAYFGYLHRVLPLYGKIYISDRSFCFRSLLPGTRTKLILPLKDIENVDKEKGFRFKYSGLVVTIRGHEEIFFEFNLADDRDDCAVTLLQNVETTRWMQESGLLTMDEKESAETASAEHKALQQARRELHSEHDISMPKEVDGGSPPILFDDPRASILNFKPTESLRITCLTIGSRGDVQPYIALCKGLMAEGHKTRIATHLEFKDWIESHGIAFAPVDGDPAELMRICVENGMFTYSFLREASSKFRGWIDDLLSSAWKACQDSDLLIESPSAMGGIHIAEALRIPYFRAFSMPWTRTRAYPHAFAVPEHKMGGAYNYITYVMFDNVFWKAISGQVNRWRKKELGLQATSLEKMQPNKVPFLYNFSPSVVVPPLDYSDWIRVTGYWFLDEGSKYTPPKELTDFIKKARADGKRLVYVGFGSIVVADSAVLTKTVVASVIKADVRCILSKGWSDRLDKKSANDVEVPLPPEIFQIKSAPHDWLFSQIDAAAHHGGAGTTGASLRAGIPTIIRPFFGDQYFFGQRVEDLGVGILIKKINVTVFSRALWEASHSERMITKAKVLGEQIRKEDGVDTAIQCIYRDMEYANSLIKGKEGKSVDDTLEDSEESWTFIGDDNDPELVRRIHDWESMAHSGTLSDKNAMAWSGSDAASRVVSPARKAA

SEQ ID NO: 7534 - protein, 572 aa, Chlorella variabilis
MTESLDYQAAATAAMEPRRTILLTAMGTRGDVQPFVALGLHLRDARRWRVVLAVPPEYRGFVEGYGLEAEDIGISLQHAVSSSPQGRALRTAGALTAFQATQDFFRLPLLESWFASIRRLLAQLRPDVLLLSGFVAMSGSAALPALLGLPTRVVLSYTIPMLPTAEFGMPLAGTGFTAPAGWINRLQWQALQAAVSQPLHMSRAQRIVDEAVAAAEASAAAGAVGAEVQREVAATFGSSSSSGSSGSSSGASSGASSGASSPQPVGSLAGSAAQPPRSGGIKLGRSLTPGVAPTLYIYSPSLLPKPADWPSHSHVVGPLLLKRQQAPAAAAGGQQGAAVGLPAELQAYLDAAARAQLPVVYIGLGSMLGTVFEAAEVQRLIGCMREAVVAASSQLPLCAVIHTNLLPGSCNGGGGGGAGGGTGPGLQAQARQEQERSGLPPTYFLLQTPVPHELLLPQCDLVVHHGGAGTTQAALLAGKPSLVVPCVPSSDQPFWADLVHRRGLGPPWFPVLRLTAAKLASGIQRGLLHLDRYTAAAEALGREMNREDGVAAAADIIEQCGGAAAAARQQRA

SEQ ID NO: 7535 - protein, 1556 aa, Ustilago hordei
MVGLRPLFGTRASVENVHDSFGKTVELVKSSESDRAPPPQDNQKQSSATPPSFETPIPHNNANKAQIDQHQKEQAEQHHGGNSLAGLLNGAALMSPQDDHSQPEDHRYDHSVDSQAAAPAATSTTDSQHARKSSQDSPGWKQSAKEAESSDQHESQRASSRFGQTLKKLDAKIRTTLGVNPPPTAQEIRSPYSIGTDDHFASRTSLGAVEFLKDASIETMQHLTDDEDDDDEDDDDDLDAADSDHEHEHDDDDDKTVADHGAHDRSKPDVVRIQKDVEELNRVKSDAEKRRSDSLDQTRPGDSVRTKAPVQVSLEEKMKAIIDEFGECPSLSRPNEPEKLLVDLTAVLVKTVLIKGNLFLTNRRICFLAYIPNDQTDAEQSDSSKVEGHGDTHSSDVRAPLDPNVQNPILKSGPAIIHRPGKMRPKRRVWIELRKHSFNAYSASNKLYKPLMSARLNNLYAVLPTDWSQPHIIRFVEGVQYSSIEFKTQEAALDWRKELEAAAFHARNTAEKVRISIPLERVVGMDATPFLQVAKVVHLDVLVGSVNEEEFAVAEKERKEREQRHQLVEHSWSYNNFFVNCPKNPNFKCHITQLAFGVTHNRAAFIDLLREALKSPRATHDPLGFEELLSAVPAPLLDLEGGPDVEDPPSGGNDSSDDQHKRTLAEKFCHAFGLPSLPEELQLVKCELVRTLHTHGTMAIGLQYLLFWRRAVGRGLKIKVPLNDIQGVDTYRSMLWHHHGLVVHIRAHSDMFFDFVSKGNRDMVLSTLKRVVQAKDDNKKEADGASFVTTTTTHDGSQDSHTTKIDGDSSTDSQQASKESATEALLRNAEGEVPLFEPDMLAYLPKVVNLDRNSQRDALRILPMRIYCLTIGSRGDVQPYIALCKALKEHGHTPVIVSHPEYRGWVEGHGIEYRGVGGDPAALMKLSVEHRIFSPAFFRESIGKFRVWLDELLRECWEECQGADLLIESPSTMAGIHVAEGLGIPYFRAFTMPWTKTSAYPQAFSVPSIEMGPSYNSSSYVLFDQIMWVATSGQINRWRKHMVGIGPTDWSKLDADSVPFIYNFSPAVVPMPNDWGDRVKISGYWFLDNPESNWSPPKEMAVFLKRAKKDGKKIAYIGFGSITIENAEEVSANIMRAVHQADVRAIVAKGWSGRGGSKPKKKKKQPHPQQQKPQQQHSTSQNDSEDTATEEEHDSEIELPDDVFVVDSVPHDWLFPQIDIAMHHGGAGTTGASLRAGLVTLIKPFFGDQFFWANRVQKLGAGARVNSLGVSDLADALKSAASDRVMVEKAQGVGELIRSEDGVATAIEFLYKNIPLAKRRTQRKIDREASQNSPAGTPSGSVFSNPLSRFSSHGRQPSGSSKADLTSTTLGGTTGNGGKERKDQHRSATLPAKAPSSTLSPAGEEHTIHRSASTIVESPESENPASPSTTSASSLFSSSLLPSLSSLNSLPSSMASTLKEMVTLQSNTTDTTADGEEAAHHTLGERSATTPAGATEMGEETEEQKMARLKGYKNAKAEDIRRRKLLQERLAREKLEKEEKSKLSEVRESEEQSQTT

SEQ ID NO: 7536 - protein, 1860 aa, Tolypocladium ophioglossoides
  MOD_RES (1811)..(1811): Any amino acid
MADHLTYIGSGPYCYANSLAMMLGKGAPSPAVLEFATSSPFGMEIIGGKLVFFDPYGWEPASNLGSALAAAGWESTLTVGKDADDALARLKEALTKGPVFVGPIEMGHLRYQPGMNGPLGADHYVVVLAIDEASAEVELHDPHGHPYATLRVADLMTAWKAESLGYGKPFMMRSDFRQVEEVSEEDVIRRSLANARRWLAMEGVDALSIPPGSSGNGEAASRLAAMVEAGLSGDMRAHLTYFAVRVGARRLADAATCLARVGGDEAARVVARQARLVGSLQHPLVVGDRAKAAALLRRLAPTYEELKVALGKLVVTPGGGLQRQGGAASAKMPSRGLNLSPQQTLTAASPLRQPTHDSLKAGTQPRSVEPSPNLTSLVHPDAQVLISSPSSAAPVSSGASILLATATDVLTARRNLISPAMAFPPDGGPASGDDAHKRVGRRLQKKRRDETSPTVELPEPLRDSDSDEETSPNDVASTRGGPMSVNMNQSIFGLIAAAGSRVDFNERFDDGSSDEEDSQQSAHAHGQREDLSQTVILRPSPTDDNSKRGHRKRLSGHRLLKSIAELPKRKHKAKRESSRLSAPVAPTSDEQSESSEPSQSPAITIQKDDNRLAPVMSRMLQARAEMSSRPSFDLERRSTELSRTDGDDDNDDTTPLAKRLMEIFQFDKPEQVIEEYPCWLLQSVLLQGFLYITAKHICFYAYLPKKANVVAKSGYLSKSGKRNPKYNRYWFRLKGDVLSYYRDSTNLYFPHGQIDLRFGISASVVDRDKDGVHFEVVTSYRTYNFRADSAPSAKEWVKSLQRVIFRSHNDGDSVKISLPIHNVIDVEETQMMEFSDTCKIRVIDNDETYAIDEYFFSFFSFGRQAINVLKILVEDASANQAAGKAGAEQRSASISAQASAQPSPRGSKNASRNDIHVGKIRTMKLPEPVKATLSPLSPRSANPSPRASCDMSTRTSLDAFRQIGRRSHEVSSMMREESPRRSFSGSGRSLSHRRRDDKKSRNMTESSDSNLQSSTDDPSYSNLAVSVDNDPSASQILRGSEVFHSPTMLRSPSSSQTMDKKARGPKELPKQSQPVHPHPHHAATTGHIDQGQFHLDFDPQRPPTPTLQSITKLGSYPLQRAGAFADYLNKTGKRMSSLLAAESMGYVEKVSGMWKGGHKHYDEPAGLRPDDDELEEDSEGKIQTSMDRFRAHFALPETERLQATYYGNILRVLPLYGKIYISDRSFCFRSLLPGTRTKLILPLTDVETAHKEKGFRLGYSGLVIVIRGHEGLFFEFSQVDARDDCAVTLLQGLETSRFLREAGILQQEEHQEEDEAIAERDALKSARQGQFPEHEIQLPQQIACLPDAPTILPDETDGSFLNFKPQNSMKITCLTIGSRGDVQPYIALCKGLLAEGHRPRIATHAEFQGWIESHGIEFACVEGDPGELMRLCIENGTFTLAFLREANSTFRGWLDELLESAYHACEGSDLLIESPSAMAGIHIAEKLGIPYFRAFTMPWTRTRAYPHAFIMPEHKMGGAYNYMTYVMFDNIFWKATAHQVNRWRNKTLGLPNTSLEKMQPNKVPFLYNFSPSVVAPPLDFSDWIRVTGYWFLDEGDEYKPPKELDDFIKKARADGKKLVYVGFGSIIVSDPAKMTQEVIDAVLKADVRCILSKGWSDRISPKDVAAKPRPDEPEMPPEIHVIKSAPHDWLFRQIDAAAHHGGSGTTGASLRAGIPTIIRPFFGDQYFFASRVEDLGVGVWVRRWGTNSFGRALWEVTRNERMIVKARVLGEQIRKEKGVENAIQNIYRDLEYAKSLIKRKAGKSAQVDNDXDDETEESWTFVGSDEPDPDMVTKRLSESYSEPGLGGGRALGSQAIKGQS

SEQ ID NO: 7537 - protein, 1168 aa, Diplodia seriata
MASELNIRDQPARWSPRRSRVPRKSFEVPERLRHGEDEDEDVTAPKTNDPRYTHRSVFDLITHAGSVANLRSRFTHDELSESEEEDNHAAVTQSLGPSALAAARGQDSNKSEEKSDKHRRSLSNRKIIRTIQKLHVKSSKERDDVPADDTMSSSQILTPKPPHIEQDETERAQGRLMRGQLKAKAEMEASAFGSDLRTAHDTFGVGHPVGKGQDDLSQRLMEIFGFDAEEKVVSEYPCWLLQTVLLQGYLYITQKHICFYAYLPKKTKEITKSGYLSKRGRTMWNRSWFILKGDVLAYYNDPTDLYFPRGRINLRYAISAVLMEPKDKAREPTDISITTNQKTYVLRAESAASAKEWVKLLQKVIFKSHNDGDSVKISIPLSNVMEIEDNPVLDYAETIKVGVVDNDDSYAVDEYFFSFFGFGEEAMNLMKVMWDGSSSRDAVTDFTIIPPTIESKDTMSVYDKVSGMWAGGRKHYAEDGQLFDEEARDIVDDSDAVSHNERFRQHFALPDTESLRATFFCNLWRVLPQYGKIYMSDRYFCFRSLLPGTRTKLVLPLRDIENVMKEKSFRLTHQALVVVVRGHEELFFDFSRADIRDDCAVTIHQKLEQVRYLHSSGLLSEENLLQAEEAKAENDLLQHARNPEKQPTLPARIDELEQSGAAVIFDDPQASMVDFTPRESMRITCLTIGSRGDVQPYIALCKRLMKEGHKTKIASHEEFGDWVRGHGIAFEPVAGNPAELMQLCVESGMFTATFLAKAHFTFRGWLSALLETAWKACQDSDLLIESPSTMAGIHIAEALEIPYFRAFTMPWTRTRAYPHAFAVQEKKMGGTYNFLSYVLFEEVFWKATASQINTWRKKTLNLAPTSLKKLQINKIPFMYNFSPSVVAPPLDFSDWVRVTGYWFLDESQNYKPPKELLDFIDRARNDGKKLVYIGFGSIVVEDPRAMEKSIVEAVLKADVRCILSKGWSDRLGKDEKSKVEVPLPAEVHQINSAPHDWLFRQIDAAAHHGGAGTTGASLRAGIPTIIKPFFGDQYFFASRVEDLGVGVHIKKLNVGALSRALWTATHDDRMITKARLVGEKIRKEDGAGEAVKTIYRDLEYARSLIKWRNRPMTEDDLGDDAEEEWTFVDDDNDPELRRLTEEDQAVAKIQAQLKQLRQAGPEPEDVST

SEQ ID NO: 7538 - protein, 1323 aa, Serpula lacrymans
MRAGTQTLIQALQALPWTDEPGDEDGSNAAPQLDSDSEEGTSGEYYNRMASSIHAIYRPVARSRRVDASAPLAGLRGHLSTRTVQEGPYFSEGMVNSEDDGEVEDFEAVTPRPAAHRPEYIKSQPPSSSVVSEAFERNAYSRTGSMTTVRVQRRTRLAEKLKEVFDLNDIDEVLHKEMPCWLLRSVLLQGYMYLTNSHLCFFAHMPAREDQVLKSGSLNKKTQRTKRWIKYWVVLKNDAISWYQSSSDPYFPHGIVDLRYAISCDPSGEKDIRMRTTQRSLVLSADSVPSRDEWVKAIRKVMFKAQNMGDSIAIPYSAVLDVEKSSAMDFSETIEVKVIDKEDNISMDSYFFAYFHDLPAALEQIRDAVRAGRNFVQRSSPQTVVDTTTLRPLPSVPQAIDRARSLPIPDTSKITSGFSLSSLLRPFQDTLPLGRIGSAPDRSEGSEDYTHISKRGDTSFIPITTSPPNISDVSESAKNKHPPSHSTSLNVTTTDHTYPPSTLIGDMSDMAIKDSGSSGSSWNVGVPSWLKGSRKVFSLSSAITSPGDSAAILSTSPVASNVSEVYSSPTPANRSGSGTNDLGYSILETQEATVDLHATEKFKNAFAFDDKETLLGYFTGYIFRLLPVYGRLYVSTNYFCFKSSGPLTARTRMVLPLRDVLTVEKTKAARFGHHGLIIIIKGHEELFFEFGVEDRRNAFVTIVEKQLEDVRKRLHAVEPQPLTQGKRDALILEEFEPRSSSSTDANSIPPPENLADSLPAVMFTSASSTFLTFKPQKPLHFTFLTIGSRGDVQPYISLARGLMADGHRVRIATHGEFKVWIEAHGIEFGYVGGDPAELMRICVDNGMFTVSFLKEGVQKFRGWLDDLLKTSWDACQGTDVLIESPSAMGGIHIAEALQIPYFRAFTMTWTRTRAYPHAFAVPEHKMGGSYNYMSYVMFDQVFWRATSGQINRWRRNVLHLGSTSLDKMEPHKIPFLYNFSPHVVPPPLDWPEWIRVTGYWFLDDAEVGAKKWVPPPDLIPFIDSAHQAGKKVVYIGFGSIVVSNPQAMTRCIIEAIVQSGVYAILSKGWSDRLHVKTGEAAEPEEPLPKQIYAISSIPHDWLFQRIDAACHHGGAGTTGASLRAGIPTIIRPFFGDQFFWADRVEALGIGSGVRKLTVESLTEALRSATTDVKQIDRAKLVGEHIRAENGVATAVEAIYRDLEYARSLIKRTAVEDTSENEANTEDTTVQDTRPSSSHSTLDRRRSRSRYSSGGSARGAPSEDWSVISDQDDLRSSFGSRRSEGKVDRSLTMKRNSLAAAVMSVLPDSLTSSHHRSNSASSQP

SEQ ID NO: 7539 - protein, 613 aa, Oryza glaberrima
MASAAEEAKGVEEGGGGASANGGDNPATATATATASASAAAAASSSSPADDRGLPRSSTMPGGINNVEITNETAGPSNLERSRTERRRQNNPADDPTKQLFDDKISLKKKLKMLNRIATVKDDGTVVVDVPSSLETSTTDGVAYDGYSDVTVEEPLDGADIPVRPPMQIVILIVGTRGDVQPFIAIGKRLQDYGHRVRLATHANFKEFVLTAGLEFFPLGGDPKILAEYMVKNKGFLPSGPSEIPIQRKQMKEIIFSLLPACKEPDPDTGIPFKVDAIIANPPAYGHTHVAEALKVPIHIFFTMPWTPTSEFPHPLSRVKQAAGYRLSYQIVDSMIWLGIRDMINEFRKKKLKLRPVTYLSGAQGSGNDIPHGYIWSPHLVPKPKDWGPKIDVVGFCFLDLASNYVPPEPLVKWLEAGDKPIYVGFGSLPVQDPAKMTEVIVKALEITGQRGIINKGWGGLGTLAEPKDFVYLLDNCPHDWLFLQCKAVVHHGGAGTTAAGLKAACPTTIVPFFGDQPFWGDRVHARGVGPLPIPVDQFSLQKLVDAINFMMEPKVKDNAVELAKAMESEDGVSGAVRAFLRHLPSRTEETAPQQTSSFLEFLGPVSKCLGCS

SEQ ID NO: 7540 - protein, 1532 aa, Madurella mycetomatis
MPVTEPTTSPAGAAALHPHSSSRMAQANKSQAHETPASPPTAPTAAAGQDERAARRVSRKLQKKRRDDQHTPTMELPDRLKDHGDHIDSDEEVLRPQGYGGGLFMNMNQSIFGLIAAAGSQADFADRFEGQSSDDDEGEGGMHKTIAGHGGLRPEPGTQELPLAQTTILHKQGNAGAKAGSRHRRRISESRLLRSVPGLSRLAAKSRSFKSSKGASEAAQPHEAREADSGSSPPSDVSPSIEITRTESRTAPVMSRMLEARAQLAARPSFDLDRLSGEQAPGSDTSESGPSELAKKLKEIFEFEQPEEVIEEYPCWLLQNVLLQGYMYITARHIAFYAYLPKKANRRSQSRAIYPRCGKRNPKYNRYWFRLKGDVFSYYRDPQDLYFPSGQIDLRYGISANITDKDKEGINFTVVTHHRTYYFRADSSQSAKEWVKSLQRVIFRSHNDGDSVKISLPIENVIDIEETHMLDFAETCKIRVIDNDETYAIDEYFFSFFSFGKEAIKVLKILVEGSSSEAGQSDLAEPSSDAQSSKRTSTSGNRDQVANTQGHRTGRISEGVKATLSPMPPVRNASVSPRVSSDRPRSSFDGFRTFGRRSIDVGQSPPLHLDSSPRSFSDRQRSLSRSRQARHERHGSSDSYVHSLGDPSQASLSALVASGSSEDPSASQILRGSDVFHSPTIQRSSSKAQEVLSPTATRPNASETAKEAARPPSAGKQEDPAAAEIDVTTPTLQSIASMGGYPFRKANAFMDYLDRQSKRMSNLLATESMGYVEKVSGMWKGGGKHYDEPAGLKTDEEDAEEDLEERANSEARFRAHFALPESEKLQAAYFGYLIRVLPLYGKIYIGDRHFCFRSLLPGTRTKLILPLKDIENVDKEKGFRFGYAGLVVVIRGHEELFFEFGKAEFRDGCTIAILRNLEATRYLRDSTVLEGAGEEDSEAQVAVAEHKALQRARNEEFHDHEVQLPHQASSSSETPTILFDDPKASFLNFKPSQPMKITCLTIGSRGDVQPYIALCKKLIQEGHKPRIATHGEFKGWIEGHGIEFAMVGGDPSELMQLCIQNGTFTWAFLKEANSKMRGWLDELLRTAWEACQGSDLLIESPSAMAGIHIAEALGIPYFRAFTMPWTRTRAYPHAFIMPGQKMGGAYNYVTYVMFDNVFWKTTAHQVNRWRNQTLGLPNTTFEKMQTNKVPFLYNFSPYVVPPPLDYSDWIRVTGYWFLDEGGDKFQPPKELQEFIDRARRDEKKLVYVGFGSIIVPDPAKMTQEVIDAVLRADVRCILSKGWSDRLPGKGGDNLEVASGDGEKKPEPELPPEIFKIQAAPHDWLFRQIDAAAHHGGSGTTGASLRAGIPTIIRPFFGDQFFFGSRVEDLGVGICLKKWGATSFARALWEATHSERMIVKARVLGEQIRGENGVETAVQCIYRDLDYATNLIKSKAGRNQTRREAAAGNAAAMDGSGAEVMADLDDEEEEESWTFVGGDAEVIDDLTSEGVMKRTVADLEKTPGRAPESRVLGVGIGIGAPCDGTQVEARLSS

SEQ ID NO: 7541 - protein, 1465 aa, Rhinocladiella mackenziei
MANLDTPLKKGSSRKLQKRNPNLNRLPSSHIPSRLRLGADAQEDVTAPTRGHNAPAQYMNQSIFSMIAAAGSRTDFNARFDESSDSDDEIIEKEQTTTEGESHAAPRGTESKAAQAVTRKDGKTSKSQRLLGGRPVQSLERPSSRPARLEEIEPPPRQSPSPQSDATSKSSRSNPRDAPVLSRLITAEAEFQECAEAGEEGSSSPRGQKSRSRRESSPQTLLATRLMEIFGFEKPEQVVAEYPCWLLQSVLLQGYLYITEHHICFYAYLPKKSHTVSKTGYLSKKGRTTSKYKRYWFSLKGDVLSYYSDPSNLYFPSGNIDLRYSMSAGFSSEKSKQKECKDFSVTTDHRTYHFRADSASSAKEWVQTLQKTVFRSHNDGDSVKISLPVDNIIDFEESPVVEFAETVKIRVIESGDSYAIDEYFFSFFSFGQDALQVLGGLLTEAPTGRTSEDLWSPTRRGDTMLSPQAMSSARRHSSDVVSGSPRAQSSPPLKDNVRTTLLPFSLGSDGRMPPGMSGEFSRGDSPSRSSGDFGGEYGRASFDRGRRSGSTSRLDVSKSRRTGRSPLARHHDSEDSYVQSIDKETDSSTAPLSPGVEAQMSASQILSRSDVFHPRAAHRMETFTSLSTEPTRKSSEAGTILSSSPRRETTSPIPIRWMADAAGHASNDRRATAPEDVVFSELERDKKLSRNDPPPTLQDLVKAGTYPLQRAGALADYLKNRSVSMRKLLATESMSYLEKVSGMWAGNRKHYGENEGIVPDDKGIDPEDEEANVGHGDRFRAHFALPTTEKLQATYFGFIHRVLPLYGKIYISNRKFCFRSLLPGTRTKLVLPLKDIENVDKEKGFRFGYHGLVLVIRGHEELFFEFSSAEHRDDCTVTLLHSLETARYMAESGLLAQQDEDDAEIAKEEHRMLQEARRISAGEHHLVLPDTAETIYSHEESPPVLFDDPHASIINFKPTTPLRITCLTVGSRGDVQPYIALCKGLLAEGHKPRIATHAEFGAWVRKHGIEFRPVDGDPAELMRICVENGMFTYSFLREASAKFRTWIDELLTSAWHACQDSDLLIESPSAMAGIHIAEALGIPYFRAFTMPWTRTRAYPHAFAVPEHKIGGAYNYYSYVMFDNVFWKAIAGQVNRWRKKELGLRSTNLDKMQPNKVPFLYNFSPHVVVPPLDYSDWVRVTGYWFLNEAQGWTPPAELTAFIQKARDDHKKLVYIGFGSIVVSDPAALTKTVVDSVIKADVRCILSKGWSDRLGDPAAVKTEVPLPPEILQIKSAPHDWLFAQIDAAVHHGGAGTTGASLRAGVPTVIKPFFGDQFFSGSRVEDLGVGICLKKVNVSLFSRALWEATHSERMIVKARLLGEQIRKEDGVQTAIRAIYRDLEYAKTLIKPRPAIEGSAAIAAADFDDGGDIEESWTFIGDESDPELQRRMHDWESPARGRAPRVSMDRAGLRAVQGVEPVRKHSVKR

SEQ ID NO: 7542 - protein, 1499 aa, Candida maltosa
MSFYKKVTQNLLPNAVHHHHHRQNSSTSTDNEDDLASVRSRSTYQSLSGRLNYDDDDSDDEDDLAKLEDGNFFTGLLNTTTVCSGLGTLNNLKKQYLDEFIKKSGLHQLRPQNSQSHHHHHSNSQTSGQSSDTKDPINRIQELNLYDSSEETSETESDDEYFENESNEKPEETEEEVIADDLEPTKTTATTTTSQTTSTATSTATPTSTLAEETTTSVAAVKIPEEHFKDLNPLQRSVVSNLDPHSIKEGILIKVKTSPDNNNQIDNESQILQQKIHLRLKIADKLQRVFDLSDDDQFIGNYSAWLIKDVLLQGHLYLTKDALLYFAFLPKRFSFLHASEVLETDDSSNIVHKGTLGFKSGKYTEAIINAVTTHRYWAVLRSETLSIYSSSTDLYFPELVIDIKNCLYAEIIDKEKAGREALSPVNRGAFSPNGGSSGASTPRSSTLEDTASELNSMLSGDTFTPTEDNVESGSSDVWFKLVTKKKTYKFHCDSSFSARQWCNNITKLIFQHNNANANSEVLIKIPISNVLEYNKRTLFSEEEDDDIDDSRNDIPLNLSIKYLSTTNSINDEDRKRDKVKKKMKGGEPIMEEVHFLFPKNGVEFFDAFDKVMNSSDKSDTASQVSRKASIASQKTMSTLVPSNNSLVQTVLEFNKADTDYDDSSTLKKLGKTITSPANIFRPSSPFSSKDKGGIDSITSRDSFENESHLQLPRALSEKGLKSLEISFVTSLKKMEEAATRYDKPHFLPTDLPLPTNLGEPTSEKKDSKKKSISKSIKALYNVGSRWSASPAHYVKDDKYFVEKEEEREESQRNFQEHFSTNSKLLASYYGHLIKTFPVYGKFYVSDSEVCFRSLLPGVSTKMVLPLLDIQEVNTSTGSKLTYHGLSLVLRGAEALAVEFGSSKARDDFQETVLGQLEILHANENFRPQPHEWGSNYDIELSKTRMEYTDSERRELQSVDKGSTDVLLAEQRIELARVRMFEDRLMAASGLDVPIILEDSPFFKTEMRPSTSYNITLLTIGSRGDVQPYIALGKGLIREGHKVTIATHEEFGDWIKKNGLNFKKIAGNPAELMSFMVTHSTMSVGFLKDAQQRFKSWIAKLLTTSWAACQGSDILIESPSAMSGIHIAEALGIPYFRAFTMPWTRTRAYPHAFFVPDQKKGGSYNYLTHVLFENIFWKGISGQVNKWRVEELGLPKTNLYRLQQTRVPFLYNVSPTVLPPAVDFPDWIQVTGYWFLDEGSGDYKPPAELVKFMNDAAYDGKKIVYIGFGSIVVKDAKSLTKAVVEAVKRADVRCILNKGWSDRLDKKDQNEVEVELPPEIYNSGAIPHDWLFPRIDAAVHHGGSGTTGATLRAGTPSIIKPFFGDQFFYATRVEDLGAGLALRKLTAKTLGNALVTVTEDLKIIEKAKRVSEKIKHEHGVLSAIEAIYSELEYSRNLILVKDLHNQNYRRHHHAVSGVQTPAYDSDSDDDDDDDTEDDYTEEEEEDEKEDDRDDGTEKSV

SEQ ID NO: 7543 - protein, 1137 aa, Taphrina deformans
MSASSAQSLGSAIHEYDEPTHNIVSGTLREQSEYDKYQSTSLQRLNTSRSDQESVGVGKHDLRSLSELLQRVFTLDVEDSLISHHPAWLLKSVMLQGHLYIMKHTLCFYAYIPKREDVTVKSGYLMKKSRTTSRVHRHWFILKNNLLSYYNDASDLFYPSGFIDLRQAMTAEADIGTSSSTAFGFKLVTSEQEYSFSTDTASSCNEWIKTLRKVIFRLKNVGDSVKITIPFAAVLDVEESDVLHFTDTMKIRIADDHDTFAINEYLFSLITPSYEIINGVKFQMQANQEQSGPKLAPKHSNMTPVFDTSKAAPLYYHSEVKNDMAAWRARATESEDNIEHFAKEVIDQRGRSRRSLSLVNPFRKTKASTSTASPTRLGDSTDTITPQGEVSKPSGVTKLLDKSLRKVGSIATSAYKVPISAIQYPIHSFLSKKASHDDPAIDEALAGSFRRRFGASDEERLLKAFKPFYVQTVPLIGDLYVSDERVCFHNSTPGMKLRIAIPLKEIQKAQKEKGFSFGFSGLILTIRAHEDMFFEFSQGSDRDQCVDFITGALENMDAITERKHARRVLLEEKAESDRCEHMSLENELADLGTTNITQIASLETAADAPAIMFDSPGASMLAFKPAKQLRFTCLTIGSRGDVQPYVALCKGLIADGQKAKIATHEEFRDFVESHGIEFVPVDGNPAELMAICVEHGMFTYSFLKEASQKFRGWIDELLKSSWKACQNTDVLIESPSAMGGIHIAEALRIPYYRAFTMPWSKTRVYPHAFAVPDHNRGGNYNALTYTAFDHLFWKAISGQVNRWRKKSLNLPSTNFDKLAQHKVPFLYNFSPSVVPPARDWHEWIRVTGYWFLDNPDDKEGHKWEAPSHVTEFIKQTREMKKNLVYIGFGSIVVSDPKALTKAVVEAVHQADVRCILVKGWSARSSQREQEEPDQSENEKTSDSEHEFGKDILSLDSIPHDWLFPQVDAVCHHGGAGSLGASLRAGVPTIVKPFFGDQYFFGSRVHELGVGLCLNTLTANSLADALKVCTSDRLIIEKSNKIGAQISSEKGVDNAIENIYRDLEYAKSLVKKDDTSFGQTSESSGDSYDMVEGGDDIDDEDLYDTRTDANGITSSILKPLKSLKTFSPVIFKARKSSV

SEQ ID NO: 7544 - protein, 1420 aa, Termitomyces sp.
MSDPTNLQTLLHAPTVAPPVDTSPEALEMESEPLALPKEVTSTPSRVKRLSAAVEKSVDKLSRSITTRSGRTSPTTPPPAGSRRLFSLSRKGRTKENSGDVEGAQMPLFDPSSPVSNLTPSASRSTLSKSTSGVTPREGFPFFSAPIPIKPALQSEPSNVDSPFITPPSPPPIRPALNPFRGNGSMRAGTQTLIQALQALPWAEVENDEDIVGPDANSSDEEEEPGKLRLASSIHAIHRPLARSKKHNIPYSTQERTSSFSCGLVDEVTEEPEVLSSEEEQEAEDFEETPRLSSSPFPSPPIQSGSILSPDKQKDRPVPRPHPRIIPSRAGSMGTIRLQRRVGLAQKLKEVFELDAIEEVRAEMPCWLLRSILLQGYMYLTNSYLCFFAHMPSREDQILKSGSLNKKAQRTKRWIKHWFVLKNDALSWYQSSSDPYFPHGIVDLRYAISCEADGDKGFRIRTNQKTVILSADSVPSREEWVKAIHKVIFKAQNMGDCVKIAIPYSLVLDVDKSTAMDFSETIEVKVFDKDEDSSVDSYFFAYFHDIPGALEHIRDAVRDYRNQPDRPDFPPIVLDTTQSRLSVNPDRITSLPSESNVTKSSSVFRLASLLRPLRTTQASVPETSPEAEDFTHVSRRPNSLSFVPITTSPKSIEGLPETHRDQTAQSLPNSASEHTYPPSTSNSHIDPDHPSLSRESSSWVGVPSWFKGTRRVFGGSSSSEQTTITTLASVRETYSSITATPSFPTTRSIIGDLTFSILETPDIPVDVETTEKFRTAFAYDEKETLLGYFPGYLYRLLPIFGRLYISTNFFCFKSSGPLTFRTRMTLPIRDILATEKSKATRFGHHGLIIIIKGHEELFFEFNAEDRRDAFIRLLDRQVENIRKRLVQGETNPTSPGKRQALILEEFDATASESDPAPVSASDTLGDSLPAVMFTSASSTFLTFKPAKSLHFTFLTIGSRGDVQPYIALARGLMADGHRCKIATHGEFKDWIQSHGIEFGFVGGDPAELMKICVENGTFTVAFLKEGLLKFRGWLDDLLKTSWEACQKTDVLIESPSAMGGCHIAEALGIPYFRAFTMPWSRTRAYPHAFAVPDRKMGGSYNYMSYVMFDQVFWRATAGQINRWRRNLLHLPSTSLDKMEPHKIPFLYNFSPSVVPPPLDWPEWIRVTGYWFLDDAEVSSKRWTPPSDLVDFINSAHRLRKKVVYIGFGSIVVSDPKTMTHCVVEAVIRSGVYAILSKGWSDRLHVKTSEASEPEEPLPEQIYAISSVPHDWLFQRIDAACHHGGAGTTGASLRAGIPTIIRPFFGDQLFWADRVEALGVGSGVRKLTVNSLTDALIVATTDVKQIDRAKLLGEQIRSENGVSTAIESIYRDLEYARSLIKHVDNDDESNDHTTFKPEFIQRDFCEPITQIPPSLTFWSLT

SEQ ID NO: 7545 - protein, 1435 aa, Phaeoacremonium minimum
MELPDRLKEATDDAEQEEDVFPAAQRGGGMFMNMNQSIFGLIAAAGSTVDFNHRLEGNSSDEDDDEDDEASSHHGRKGKAAMGVDGGVAQTTVLRKPSGKGEKHHRRKFSDSKLLRSLPTLSRLSTKHKAKKLEGKKPTVQIQEESEPESSATDSPTLGVQDENRLAPVMSRMLEARAEATSRPSFDLERLSGERGRIPGAMGDTGPTDLSKKLMEIFQFEEPEEVVSEYPCWLLQSVLLQGYIYITSKHICFYSYLPKKSHEVVKSGYLSKSGKRNPKFNRYWFRLKGDILSYFRDPSNLYFPSGQIDLRYGISASITDKDKDGVHFSVVTDHRTYNFRADSAPSAKEWVKSLQRVIFRSHNDGDSVKISLPIQNIIDIEETQMLEFADTCKIRVIDNDETYAIDEYFFSFFSYGKEALNVLKILIEDSTQQADSNKLGARAVAEEASTSELPSSKRTSMSGSRDKLVPQKIRTARLGENVKATLSPMSPQSPPGPSPRPSGEYTRGSFDAFRQFGRKSLDLARVGRPEAPRRSVSDSRRSFSGNRLGEMKKHPERYSSADSYVQSMEDPSQASISQLVASSSDADQSASQILRGSDVFHSPTIRRSASATRRRPHDHRHGSPSLRPADHGSPHLPHHAATTGHMAELGAGDELQPGTPTLQSLAKMGSYPLQRVGEMAGFVNRHTKRMSTFLSTEPMGYVEKISGMWKGGHKHYDENAALRTDDELGDDDSKSKEDKTLLANERFREHFALPESEKLTATYFGYLIRVLPLYGKVYLSERFFCFRSLLPGTRTKLILPLKDIENVDKEKGFRFGYSGLVVVIRGHEEIFFEFGQANLRDDCAITLLQGLEASRFMRESHVIDRDEQELADNALAERDALQEARQEEYPDHELQMPRQTTEIADCPTILFDDPKASILNFKPEKSLRITCLTIGSRGDVQPYIALCKGLIAEGHKARIATHIEFKDWIEKHGIEFALVEGDPAELMRLVIQNGTFTLAFLREANSTMRKWLDGLLLSSWEACKGSDVLIESPSAMAGIHVAEKLGIPYFRAFGMPWTRTRAYPHAFVMPEHKMGGAYNYVTYVMFDNVFWKATAGQVNRWRNKTLGLPNTNLERMQPNKVPFLYNFSPFVVPPPLDYSDWIRVTGYWFLDEGGQQWTPPKDLVEFIAKARKDEKKLVYVGFGSIILDNPGKFTREIIDAVAKADVRCILSKGWSDRLDPKTSGSSAEDSEKTDGESTEIPLPSEIFSIKSAPHDWLFGQIDAAAHHGGSGTTGASLRAGIPTIVRPFFGDQFFFGSRVEDLGVGISLRKWGANSFARALWEATHSERMINKAKMLGENIRKENGVDTAIQCIYRDMEYAKSLVMKKAGKNAAAAAATDSEDYDDVEEESWTFVGDGDASDELAAEAAVAGVAGGGMTMGSKALGSRLMGARAGQ

SEQ ID NO: 7546 - protein, 573 aa, Helianthus annuus
MNSNPNSGDHQNSGSDVEITSADEPQHHSGLSSESVDISLQNEKPERNKEYKIHGLLGAKFFDTKVPARKKLKWLNRLASVQTDGTVQFEIPDEVKPQNLDFGTKVDTPGASEDHDFDATTIPDFPPLQIVMLIVGTRGDVQPFVAIGKRLQEYGHRVRLATHSNFEEFVKASGLEFFALGGDPKVLAGYMVKNKGFLPSEPSEIHIQRSQIKDIVFSLLPACTNADPDTDVPFNVDAIIANPPAYGHTHVAEALKVPLHIFFTMPWTPTSEFPHPLSRVRQPVANRLSYQIVDALIWMGMRDIINEFRKKKLKLRPVTYLSNPNNSPHDLPHGYIWSPHLVPKPKDWGPQIDVVGFCFLDLASSYVPPDSLVEWLQKGEKPIYIGFGSLPVQDPNGMTEIIVKALESTKQRGIINKGWGGLGNLAKSKDFVYLLDNVPHDWLFLQCSAVVHHGGAGTTAAGLKAACPTTVVPFFGDQPFWGRQVHARGVGPPPIPVEEFSLKKLISAIHFMLQPEVKISATELANAMADEDGVKGAVDAFHKHFGRWKAKTEAAKLARPPTHFSMRRCLGCT

SEQ ID NO: 7547 - protein, 1254 aa, Trichoderma virens
MAPPENERSKPRRQPSSRPPPASEAVVTDGFVLPTLEVPPDAPPAYGSHHDQLQFSRTGFEAGAAVTGDGRVNISINTKNKRLAELLAPSIASQIAAQPSLPPVYKLPSLAGEPGKEPPPRLNVVIQIVGSRGDVQPFIALGKVLKETYGHRIRIATHATFQTFVEENGLEFFSIGGDPAELMAFMVKHPGLMPGLDALKSGEISKRRRGIQEMMLGCWRSCIEAGDGLGPPPEPHRRLEPWDPSAGMPGDPNHQPFVADAIIANPPSFAHIHVAEKLGIPLHMMFTMPWSPTRAFPHPLANIQSSNADDVLTNYLTYTLVEMMTWQGLGDVINRFRESALDLPPLSLIWAPGLLNRLKISYTYCWSPALIPKPNDWGPHIDVAGFYFLNLASSYTPEPDLAAFLEAGPPPVYIGFGSIVVDDPNAMTRLILDAIHLAGVRALVSKGWGGLGVDAVGLPDGVFMLGNVPHDWLFERVSCVVHHGGAGTTAAGIKAGKPTIVVPFFGDQPFWGAMIARAKAGPDPIPHKTLTAEKLAEAIKFCLRQETQDQAQALGRKIREEKGAEAGSRSFHNHLDIDSLRCSIAPSRAAAWRLNQRKTKVRLSPLVAAVLVERRLLKYSDLKLYRPYEYITEDQPPDPITAGATSLVTDISDIGMAIVDMPLDIFKSPRKARERCDAASQASGDESDTGSKPNSIQERSGRKTPTATSQADSTGDSNAAAPLAHSPSLPAEMNRTRSPTVDSAGSRSSSRRRAISAAATMEAAVGTSKNVGRIVTTGVKSPMNFCLGLAKGFRNIPRLYNDDTVRDIEKVTDFNSGVRVASKELGFGLYDGISGLLTQPMRGAQKEGAAGLIKGVGKGIGGLIAKPAAGFWGLPAYVMQGAYAELNKFLSRSVQNYIITSRVVQGERDLQNASEGEKADIISRWKQDADLASVYQKNANSQEREDSRARSGGGSSSWRFSPQEARRQLVAALSESKPQQKPGRTARRSYSPVPRTPDTASAIDTEYEAAIRASVVETSRGDAEEDAMIEAAIRESVKAMRQQGSLPDPVRLPLDSKHHDIFEDEEYKITDEEYQNLIEQAIRESMIGHVGDFSLPSASGAQELDAVDTAIPAHGDEPRSSASVLTPTSDEDADLQRAIEESRKVPPTLPPRTSPSQEQEDGDEDEHFRRAIEASKDEMERARHERTEEEIVMEYVKKQSLAEEEFRKQQLAKGKGKEVSEATNDGDDDDEELKKAIEESLKMSGGSSSAQPSS

SEQ ID NO: 7548 - protein, 1470 aa, Exophiala dermatitidis
MASLDTPPQRSGPRKLQKRNTKLNRLPSSHIPTRLRLGTDAQDDVTAPTRGKNAPAAYMNQSIFSMIAAAGSRTDFNARFDDSSESEDEVIAEEQPAAEASTGPIPEAVADLKEKDAGTSSDQRRRRFSRHRLAQSFPRLSARTAAAKDADPHIRRSPSPESDRTSKSSRSNPRDAPVLSRLLSAEAELQESNEADVATPSSPEGQRSRSRAESTPETLLATRLMEIFGFDKPETVVAEYPCWLLQSVLLQGYLYITKQHICFYAYLPKKSHTVAKNGYLAKKGRTTSKYKRYWFSLKGDVLSYYSDPSSLYFPSGNIDLTYGISAALSTDKGKSKECRDFSVTTDHRTYHFRADTPSSAKEWVQALQKTIFRSHNDGDSVKISLPIENIIDFEESPVVDFAETVKIRVIESEDSYAIDEYFFSFFSFGQDALQVLGDLLTEATPRRTSEDVGSPARKAEAVYTPKSRPTLPRQTSQVRPVSPGAPSTPPLRDSVKATLLPFSPKADGKLSPRRSGELSRGNSPSRSSGELQREYGRASFERGRRSGSTSRLDVSASRRTGISPLARHHDSEDSYVQSLDKETDSSTAALSPRVEAQMSASQILTRSDVFRPPPVNRMETLASMSTEPTRKSSDAGTILSSSPQREASSPIAIRGTAGVSGGFNRNLFQATTEGEAPSSGPNDQKFSKDDPSPTLQDIVKAGSYPLQRAGAFAYYLKNQSASMRKLLAEESMSYLEKVSGMWAGHRKHYGENEGIVPDDRGIDPEDEEANVGHGDRFRAHFALPPSEKLQATYFGFLHRVLPLYGKIYIGNRKFCFRSLLPGTRTKVVLPLVDIENVDKEKGFRFGYHGLVLVIRGHEELFFEFSSAEHRDDCTVTLLHSLETVRYMAESGVLGQQDDDNAEVAKKEHRMLQEARRNSGGEPQLVLPDTAETIYSHDETSAVLFDDHRASMIQLRPPSSMRITCLTIGSRGDVQPYIALCKGLLAEGHKPRIATHAEFGPWVEKHGIEFRPVDGDPAELMRICVENGMFTYSFLREASAKFRSWIDQLLMSAWKACQDSDLLIESPSAMAGIHIAEALGIPYFRAFTMPWTRTRAYPHAFAVPEHKIGGAYNYYSYVMFDNVFWKAIAGQVNRWRKKELGLRSTNLDKMQPNKVPFLYNFSPHVVVPPLDYSDWVRVTGYWFLDEANEWQPPEELVAFIKRARDDGKKLVYIGFGSIVVSDPAALTKTVVESVVKADVRCILSKGWSDRLGDPSAIKTEVPLPAEILQIKSAPHDWLFRQIDAAVHHGGAGTTGASLRAGVPTVIKPFFGDQFFFGSRVEDLGVGICLKKVNVSLFSRALWEATHSERMIVKARLLGEQIRKENGVQTAIQAIYRDLEYAKSLIKPSPAAQGAAASAAGEPDDGEEIEENWTFIGDESDLDLQRRMHDWESPARGQGVPSSIGMDRSTGLRAMQGVEPVRKTAAESQAAP

SEQ ID NO: 7549 - protein, 414 aa, Brevundimonas diminuta
MRFSIHTLGTRGDIQPYLALSRGLKARGHELLIVAPAQFAEMAAAEGVAFAPLPAEFLELLETAEAKKAIGSSGAGFGAGFKLLRYYREIGRKLLDAEWDAARMFAPEAILFHPKALGAPHIAAKLGIPLFLASPLSGFTYTSAFPTPILPFGSLGPLNRVSHALMIHGGRILFAKTIRAWRAEALGASARGKTAPLSGTLYGYSPHVLPKPKDWGADVAVTGYWFLDTPDWKPDAELADFLAAGDPPIYIGFGSIPGVDPQRLASLVVDGLKRAGKRGLLATAGGALGQIEPSRHIHVISGAPHDRLLPLMHATLHHGGAGTTGAALRSGNPTAICPFLGDQPFWARLVVALGVGPKPLVKDAMTAEDLASAFLAMDDVGMRARAAEIGTAIRAEDGVAAAIDFIERKLNQAR

SEQ ID NO: 7550 - protein, 2798 aa, Pseudogymnoascus sp.
MVKKESEDSTATTAKMESKDSKMSAFERKRLENIAANQAIMKDLSTTAKKIIPKAAPKPARSKTPRKREPPVKREATRPTRTSSRIAGLEADGEGAKRKFEEEFQFAKDDAKAKKMRVAGDLNLSDIAVEGKKWTNDDNFLSSIMRGAQPYERTFDDSDIKTTTNEELKSLREKMSRLELYKAWEPNDIKITPERIYSMGFHPTHDKPLIFAGDKIGNLGLFDASQKGEVDDDGDQTEAPVITAFKLHSRTITSLLFPANHTELYSGSYDSSIRKLDLQKQVAVEVYAPPSMDDDEAISAIDMNSNDPNLIYFSRLDGAFGRHDMRTQKDTEIWYVSEKKVGGFSLHPLHPHLVATASLDRTLKIWDLRKSTGKGETRQPGLLGEHTSRLSVSHAAWSSSGHVATSSYDDTIKIHSYTKAKTWGVGHTITEEDMEPTAVIRHNNQTGRWVTILKAQWQQRPDDGIAKFVIGNMNRFVDIYTSEGEQLAQLGGEGISAVPAAAEFHPTRNWVAGGTASDKRAGIMIRSHEDVKKRVGRKLTKKRREDRRVTMEIPERFEDGDDADEDCTAPKGQNGLINQSVFGMIAAAGSQADFHARFDGQDSDDEDDETTEPDDAIRLSEASSDPTTSKASTDERRSRHMFHRRNLSDNKLLRSLSQLGSKNRTKHTQLSTASSDPVTPEKIKDTERDHAARSPFKGPPIMSQMLEAKAAAVQRASFDSRRSDYIPGQSVGADGAEGSPSDLAIRLMEIFEFESPELVIDEYPCWLMKSVLLQGYMYITEKHICFYAYLPKKSNEIVKSGYLSKRGLKNPKYNRYWFCLQGDVLSYYTDPSDKYFPSGNIDLRYGISASVVDKEKTFFEVITNHRRYQFHADSIPSAKEWVKALQKIIFRSHNDGDSVKISLPIENVIDVEDSPVIEFAETCKIRVIDNDETYAIDEYFFSFFSFGKQALNVLRTLVSDSAAKQIPEDMLVQPQGNSGGNSPKAGSSRPSLAISTRESKPFLNPAKATTSGLGESVKATLAPLMSSPLHVHSPRGSGEFSRTSFDINRSSSQTRASRRSMDVSRLNLDGNGRNGSPSNDRRSFSRNRLPEKKNSEKQDSSDSYVHSMEESSAAAQSASEDATGSASQILRGSEGFFQPTIHRSASASRRRDDAQLLGGPSLPQSPTALPHAATLDIYERPKLTQGDNASSPSLQTLAKAGAYPLQRAAGFANYLNRHSKRMSTLLATESMGYVEKVSGMWKGGKKHYDEPLGQGLEDDTDDEGGQSDGAEHRFQAHFALPAGEKLQAAYFGYFHRVLPLYGKIYISNRSFCFRSLLPGSRTKLILPLKDIENVDKEKGFRFGYSGLVVVVKGHEELFFEFRQPDARDDCCVTLLQNLETIRYLKESGLLTQEEEDSAAWAVAEHKALQEARHESRQHNHDLELPTTAEGASTDLAPIMFDDPRASILNFKPTESLRITCLTIGSRGDVQPYIALCKGFIAEGHRPKIATHVEFKDWIEGHGIEFAPVGGDPAELMRICVENGMFTYSFLKEASTNFRGWIDDLLSSSWIACQNSDVLIESPSAMAGIHIAEALGIPYFRAFTMPWTRTRAYPHAFAVPEHKMGGAYNYITYVMFENVFWKAIAGQINRWRKKELSLPRTSLEKMQPNKVPFLYNFSPSVVVPPLDYSDWIRVTGYWFLDEGTDYTPPKEISDFIAKARADGKKLVYIGFGSIVVSDSAALTKTVVNSVLKADVRCILSKGWSDRLDKIGATEPEVLPEEILQIKSAPHDWLFTQVDAVTHHGGSGTTGASLRAGRPTIIKPFFGDQFFYGSRVEDLGVGIYLRKLNVSVFARALWEATHSERIIAKAKRLGEHIRSENGVDTAIQCIYRDMEYANSLIKRKSGSHEGLAEDIEESWTFIGDDNDPELMSRIHAWDPRVVLAHSKDMTEPQSKDVTDSPAPIELIPHAFADCFKPKEETKMGKPLNLGKKLKYPITVNKLLKSPGDSFAKGDAIFEYSFKWKKEVGDAFGDRWEEEITTIVSFASTADGKLLRWAIRPGLVIHHDQSCAEIDETCSHAVQYAGLCALCGKDMNETSWATDTVDAQRAQINMIHDQTLLSVSQDEASRAEEQLQRRLLKNRKLSLVVDLDQTIIHACIEPTIGEWQRDPTSPNYEAVKDVKSFQLHDDGPRGLASGCWYYIKMRPGLAHFLATIAEKYELHVYTMGTRAYAQEIAKIVDPEHKLFGDRIISRDENGSLTAKTLSRLFPVDTKMVVIIDDRADVWPRNRSNLIKVVPYDFFIGIGDINSSFLPKREETPKVAPAPPPAVAVESIPDTEETTETESTVDDAEGQAQVRRDELKSKAASTDTTESMSALEELVAMGGGDDPTIREIQAQEQAEFLEKQLKERPLLHMQQQLDKEDNAEGEEATNGTAEESENTDDSAYHHHRHHLLKDDDNELAYLENHLLGLHRTFYEQYDKALINAKGDRVAHLRPGATRKVQMKDEAADLQIVPDIGEVMPLIKANSLRGTSIVLSGLVPLGVDVLRSEIAIQSMSFGAQIHTKISRKITHLVVAANRTRTQKVRQATSYPHIKIVNQQWLVDSMSRWEKVDETPYLINIHREDKSTQPELFSDGRSLDDSSGDDSEGEGRSSHDDADVPDDFEGDQSPIEGLKDVDWSGVDAELEEFMASGSESESESVASNTSDRSQQSTVSIRRKRKLDSKDGEETDEESNISKKQRLARNRTTGLKTVKTPNSASGSSLPTPEKTAAEDGDETHQTDTQDEEFDNDLEAEMIAEFEKGDWDSPEEGDDDSGGGGG

SEQ ID NO: 7551 - protein, 1473 aa, Capronia coronata
MASLDPPPKKTGGRKLQKRNPNLNRLPSSHIPSRLRLGPDAQDDVTAPSRGRNAPAAYMNQSIFSMIAAAGSRTDFNARFNDSSESEDEIAEEEQTTAPGDRPEASTSAPVKNEPAKEEDTQSEPTDQRSPGHRIVRSLPRLSARALKRKDKDRPSQQSGSPDSDKTSESSRSNPRDAPVLSRLLSAEAEFQESGGNDTQREPGSDAQQPRTRAESSPQTLLAARLMDIFGFDKPETVLAEYPCWLLQSVLLQGYLYITKQHLCFYAYLPKKSHTVAKNGYLAKKGRTNSKYKRYWFSLKGDVLSYYTDPSNLYFPSGNIDLTFGISAALSTEKGKRKECRDFSVTTDHRTYHFRADSPSSAKEWVQALQKTIFRSHNDGDSVKISLPVENIIDFEESPVVDFAETVKIRVIESEDSYAIDEYFFSFFSFGQDALHVLGELLTEAPARRRSEDVFSPIRRAESPSSPQSRPAELGPGSPGRPSTPVLKDSIRATLLPFSPGGDGRMSPRKSGELSRGASPSRSSGELPREYGRASFERGRRSGSTSRLEVSASRRNGRSPLARHHDSEDSYVPSIDKETDSSTAPLSPRVEAQMSASQILTRSDVFHSRPANRMETLASVSTEPTRTSSDGGTILSSSPHREAASPRAVRGMADVTGHSPRGARAPVHNEATFPDNDKKVGKDDPSPALQDLVKAGTYPLQRAGAFAYYLKNRSVSMRKLLAEESMSYLEKVSGMWAGGRKHYGENEGIVPEDRGIDPEDEEANVGHGDRFRAHFALPPTERLQATYFGFLHRVLPLYGKIYISNRKFCFRSLLPGTRTKLVLPLKDIENVDKEKGFRFGYHGLVLVIRGHEELFFEFSSAEHRDDCTVTLLHSLETVRYMAESGLLGQQDEDDAEAAREEHRMLQEARRNSGGEHQLVLPDTAEAIYSHAETSAASMGDPGASIINFRPSAPMRITCLTIGSRGDVQPYIALCKGLLAEGHRPRIATHAEFGPWVQKHGIDFRPVEGDPAELMRICVENGMFTYSFLREASVKFRSWIDQLLTSAWRACQDSDLLIESPSAMAGIHIAEALGIPYFRAFTMPWTRTRAYPHAFAVPEHKIGGAYNYYSYVMFDNVFWKAIAGQVNRWRKKELGLRSTNLDKMQPNKVPFLYNFSPHVVVPPLDYSDWVRVTGYWFLDEAQDWQPTEELTAFIRKARDDGKKLVYIGFGSIVVSDPAALTKTVVESVMKADVRCILSKGWSDRLGDPTRAVKAEVPLPAEIFQIKSAPHDWLFRQIDAAVHHGGAGTTGASLRAGVPTVIKPFFGDQFFFGSRVEDLGVGICLKKVNVSLFSRALWEATHSERMIVKARLLGEQIRKENGVQTAIQAIYRDLEYAKSLIKPRPAGPGTSASATGEPDDGGDIEENWTFIGDESDPEMQRRIQDWESPRRGRAGPRWSMDSPAPATTPGPAAAAAAPAAGLRAMQRVEPVRKGR

SEQ ID NO: 7552 - protein, 1270 aa, Fusarium fujikuroi
MAGIVDEKAAAGRQHQPRDGDNRNTGAVASDDLQLPDINPAEEHGAPPPYGENHDQVHFSQPGFDAGAAITGDGRVNININAKNRRLTDLLAPTLQGQLAPEPEQPELPPAYIPPSLGGLPGQTPPPKLNVVVQIVGSRGDVQPFVALGKVLKDTYGHRVRIATHPTFQLFVEENGLEFFSIGGDPAELMAFMVKHPGLMPGFDAITSGEVSKRRKGIQEILMGCWRSCIEGGDGLGPPPKPHASNAPLDVSLEVPGGPGQEPFVADALIANPPSFAHVHIAEKLGIPVHMMFTMPWSPTRAFPHPLANIQSSNTDDVMTNYMSYTLVEMMTWQGLGDVINRFREKALDLPPLSLIWAPGLLARLKISWTYCWSPALIPKPNDWGRHIDIAGFYFLNLASSYTPDPDLEAFLRDGPPPVYIGFGSIVVDDPNAMTEMIFEAVRLSGVRALVSKGWGGLGADDLGKPDGVFMLGNVPHDWLFEHVSCVVHHGGAGTTAAGIKAGKPTLVVPFFGDQPFWGAMIARANAGPDPIPYKQLTAEKLAEAINFCVKPETLEQAKLLGQKIREERGTDVGGKSFHDHLDTDKLRCTLAPSRAAAWRVRRSQVRLSAFAAAVLVEQGLLQWSDLKLYRMTEYNTEEQPTDPISACTLSLVTDIGGIGMAIADMPRELFKSMSQPKKKNSTAVEAQDGTTPLASGSETSLPAPQGNEPEKTSTPAPSIADTETLGSTISTTAHSNASQPTLSDTASSASRPWSPDQSSTQGSANDKSWKEQIKEAAVKQQQRRASSVNYVNAAVGTGKGVGRVVTTGARTPMNFCLGLARGFRNMPRLYNDDTIRPVEKVTGVGSGVVVAGKEFGYGLFDGITGLVTQPLKGAEKEGVQGLVKGFGKGIGGLIAKPAAGFWAIPAYTMQGVNAEVSKYFAKSVQNYITSSRATQGQREMHEATPGEREDVVQRWNNVKFDLKNFYQWKRKEKVAGKRPEEPRLDSSEAGFERLRTGWRQTKNMSFEERKKLHADKDAWKRGFLDAPVPQSNANDAASIQTSPSEDPELEKAIRASVRETSRGDSEEDAHVEAAIRESIKAVRQQVGSSEAGPLPLKDPSIFEDADYQITDEEYQALVEQAIQQSLGNDVPLPDYSDVPELDATDIVSQTPAQTSTQEDDAELKRAIEASRNQPPPPLPPREENDDELERAIAASREAMEQESNQRSEEDIVMEYVKRQSLAEEEYRKQMAKGNGAAGGGNDEDDEELKRAMEESLKMNRGDASGPSGR

SEQ ID NO: 7553 - protein, 1443 aa, Botrytis cinerea
MAPEDELKKRVARKLSKKRNEGHQATMELPERFQDGDDADDDYTAPNAMNQSVFGMITAAVGPKVDFNARFDAQSSDEEDDSRKPTRQSSESHINYDSIDQKGGGSERHRRKFSESKLIRSFSRLGSRSKSKSSNAVAQGSRSRSRTPSPVRDSHQESTTPDIKSPQLQPRDAPVMSRMLDAQAKLALRPSFDMPRSSKELTEIDEDEETPSTSLAKKLREIYKFETSEEVIEEYPCWLMKSVLVQGYMYITSKHICFYAYLSKKSHEVVKSGYLSKSGQHNPKYNRYWFRLKGDVLSYYNNQADLYFPRGNIDLRYGISASITEKGKGKESTHFTVETHQRKYHFNADSAPSAKEWVKALQKIIFRSHNDGDSVKISLPIENIIDIEDSQIVEFADTCKIRVIDNDESFAIDEYFFSFFTNGQEALNVLKILVEDTTAQKLAQDILSPSAADDSHNSSKHTSIHMSHNKKPHVPPIQTTTPALEESVRATLSPLRSPGPGSPRASTDMSRPSSDVFHRSIDLNKHGRRSIDLNPFQTKSGRSTSANGISTRRSLSTNRLSREKGTSKQGSSDSYVHSLDEPGSYEALPSASDENQASASQILRGSDVFLSPTIQRSPSSGRGKNKDDFQSPESHPLTSPRRSADVSPTRTYRPEKPKHAATTGSMGDSDARQGAISSGPSLQSIVKAGSYPLQRAAGFAGYLNRHSKKMSSLLATESMGYVEKVSGMWKGGKMHYEESHGMPRDDEMSNMKNDDDNRDGVTHAERFRQHFALPPDEKLHAAYFCSWQRLAFLYGKIYLSDRSFCYRSLIPTVKTKIIIPLKDIENVEKETSSRFGYSGLVVTIRGHAEIFFEFALPDDRDDCLVTLLQNIETIKYMDESGLLTMEERESAEVASAENQALIQARHVLHPENHISDISTPKVGDTGSPPILFDDPRASILNFKPTESLRITCLTIGSRGDVQPYIALCKGLMAEGHKTKIATHLEFKDWVESHNIEFAPVDGDPAELMRICVDNGMFTVSFLKEASSKFRGWIDDLLSSSWKACQNSDVLIESPSAMGGIHIAEALRIPYFRAFTMPWTRTRAYPHAFAVPEHKYGGAYNYLSYILFDKVFWTAISGQVNRWRHKELGLQATNLEKMQPNKVPFLYNFSPSVVVPPLDYSDWIRVTGYWFLNESSNYTPPKDLTDFIAKARADGKRLVYVGFGSIVVPDSAALTRIVRDSIIKADVRCILSKGWSDRLDKKGANDVEVSLPPEIFQIKSAPHDWLFSQIDAAAHHGGAGTTGASLRAGIPTIIKPFFGDQFFFGQRVEDLGVGILLKKLNESLFSKALWEAAHSKRMITKAKILGEQIRNENGVDTAIQCIYRDMEYAKSLIKLKEGKSDDDALEDSEESWTFIGDETDPDTMKRIHDWDTMARSGTLSDRHAMTWSGSDLASRALSPARNAG

SEQ ID NO: 7554 - protein, 835 aa, Aspergillus ruber
MSSSKTQTVPDELFLDQPPPPYLEIAEDAAGVQDDGRIEVDLESSACKAAIKLIPWPSEDFDVPPPVYTEVVTSKAKLNIVIQVVGSRGDVQPFIALGNELQKHDHRVRIATHNVFDSFVRNAGLEFYPIGGDPADLMAYMVKNPGLIPKMKTLRGGEIQRKRNMVAEMLQGCWNSCIEDDPLTATPFVADAIIANPPSFAHVHCAQALGIPVHLMFTMPWSHTTAFPHPLANLKYSETSANFANFASYGIVEWMTWQGLGDVINDWRKTIDLEAVPITEGPNLAATLKIPFTYCWSPALIPKPADWASHIDVCGFFFCDPPNYQPPPDLDAFLRSGPPPVYIGFGSIVIEDPERLTAILLEAVRMTGVRAIISRGWSKLGGSSPSTRDIFYLGDCPHEWLFPRVAAVIHHGGAGTTACGLRYGRPTSIVPFFGDQPFWGNMVAAAGAGPKPIKHTLLNANNLADAIRLCMRPETSTAAGNIANMMQAECGVQTAVESFHRNLPWDMMQCQILPDEPATWIYEKSLSKPLFLSKTAAQVLADHLRLDSKDLQFHSPNPIVILNRRWDPITGTTSAAIGTGADLARATTDMFLKPYQEISRGRRNSSRPSTPRTTSSPSIQRADSDSQVPNADEVTRAIEQDPHSGWITTGRAVGAGAKGIGKFLGSYYKGVLVDIPLATTEGLRAVPRLYGEDVKDYNVKDWKSGALAGGRNFAHGMSRGLADIVRQPYKGGVEDGAVGVAKGFAKGTIGLTTKMSSAALGLVAYPGYGITKSIHAAVRTKTRKNIVKARKREGEHRAMIAVASGLDHSAMLRSFEAYKRENTESRPSSRWREPA

SEQ ID NO: 7555 - protein, 1184 aa, Fistulina hepatica
MATVKLQRRARLAGKLKDIFELDSINEVLAEMPCWLLRSVLLQGYMYLTNSYICFFAHMPLREDQVLKSGSLHKKAQRTKRWIKHWFVLKNDALSWYQSSADPYFPHGIVDLRYAISCDPVDDKDFRIRTNQKTILLSAYSAPSREEWVKSIRKVMFKAQNSGDSVKIAIPYSCILDVERSTAMDFSETIEVKVFEKESPFSIDSYFFAYFHDLPAALDQIRDAVRDYRNRPHLDSPQALLDTTVPKGPPMTVDRTASLPAEIPSSVSSPLTPSVSSSSRTGFRLTSLFRMPTLDARSGVPLSRGSSGESSQSASEDFTYISRRPDSFIPITTSPDMEQASETPTQSRIEHTYPPSTSLSPAESPDESSFTRTASATPTQIPAASSFSSLLPISVPLWLRPSRKLWGASGGQLSVLTSSNVKEVYSPHTIEDRRTNGADMAFSVLETPDVRIDTETTDKFRQAFAYDEKEILLGYFPGYLFRLLPIYGRMYVSTNYFCYKSSSRLTSRTRVGFMAIPIRDILSLQKSKGTRFGHHGVIVIIKGHEELFFEYWAEDKRDAFVRLLQRQMEDVSRRLEAGNDSVPTQGQRDALILEEFDAPPHSTDANEDGESGSAPDVGLADSLPAVMFTSASSTFLTFKPKKSMHFTCLTIGSRGDVQPYIALAKGLMADGHRVRIATHVEFKDWIESHGIEYGYVGGDPAELMRICVENGVFTVSFLKEGLQKFRGWLDDLLKTSWEACQGTDVLIESPSAMGGYHIAEALRIPYYRAFTMTWSRTRAYPHAFAVPENRMGGSYNYMSYVLFDQVFWRAISGQINRWRRKLLNLDSTSLDKMEPHKIPFLYNFSPHVVPPPLDWPEWIRVTGYWFLNDADASGKKWTPPPDLVQFIDSAHKQGKKIVYIGFGSIVVSHPKAMTRCIIEAVVASGVHAVLSKGWSDRLTAKTGEASQIEEPLPKQIYPIPSIPHDWLFPRIDAACHHGGAGTTGASLRSGLPTIVHPFFGDQFFWADRVEALGVGSCIRKLTTEGLTRAFSSVTSDVKQIERAKLLGEKLRAEDGVAAAVECIYRDLEYAKSLIKRLDTDDESDHDKATHSSPEGNSGYSSSGSARLGGASSEDWSVISDQDEPRVSSSSRHSGRRRHSDGRDRQAKRHSFAAAVLSALPDALAHSSNKTAPNSPRHNSSVLPS

SEQ ID NO: 7556 - protein, 1439 aa, Exophiala spinifera
MASLEDTSRRRDTSQRTDGHKPQKRNPRFPRLPSPSMPSRLNLGADAHEDVTAPSRGRNAPAQYMNQSIFSMIAAAGSRTDFNARFDESSDSEEEAAQTKPSFVGSKETSVKERQTAPATEAKDDSPSFMKRSKYPSPDHLSENLPPSPARAPKPKDKDKASTPQPELSQESDSASDSGKSNPRDAPVLSRLLTAEAEFTEGDDHPPSMPPSETVPESVLATRLMEIFGFDAPEKVVAEYPCWLLQSVLLQGYLYITTNHICFYAYLQRKSHNVTKIGYLEKKGRTTSKYKRYWFSLKGDVLSYYSDPSNLYFPSGNIDLRYGISAHASSEKRKQKECKDFCLTTDHRTYHFRADSASSAREWVQTLQKTIFRSHNDGDSVKISLPVQNIIDFEESPVVEFAETIKFRVLESEDAYAVGAVDEYFFSFFSFGQDALQNFRTLFPEGDGARTSDELLSGTRKDVSTFSPQGRLNMRNVSPRRTPDNEPTKSSPALQENVRATLLAHPALRSRDISPRMSGEFSHGNSPSRSSGEYGRGSFERGRRSGSTSRLEGNISRRRPDSSFAHHHDSEDSYVHSIDKETDSSTAPLSPRAEAQMSASQILDRSDLFHPPIIQRMTTLASMSSEANSEGGTVLSRSHPNDAASPIPVRGAGTHWKNKHSISQEEGVAHTNTPPTLQDFVRAGSSRLQRAGQLAGFLKNPSKSVLKYLPTEPMSYIEKVSDMWTGDRKHYGDNEGVVPGDKGIDPEDEEANVGHGDRFRAHFALPPTEKLRATYFAFLHRVLPLYGKIYISNRKFCFRSLLPGTRTKLVLPLKDIENATKEKGFRFGYHGLVLVIRGYEELFFEFNSSDHRDDCTVTLLRSLESVRDMEESGMLAKEEEDDAEAAKEEHRMLQEARRSSTGDHQLALPDTAEAIYSHEDARPVLFEGPRASISSSKPTTPLKITCLTIGSRGDVQPYIALCKALLAEGHKPRIATHAEFGPWVLKHGIDFAPVEGDPAELMRICVENGMFTYSFLREASAKFRSWIDELLSSAWQACQDSDLLIESPSAMAGLHIAEALKIPYFRAFTMPWTRTRAYPHAFAVPEHKIGGAYNYYSYVMFDNVFWKAISGQVNRWRKKELGLRSTNMDKMQPNKVPFLYNFSPHVVVPPLDYPDWVRVTGYWFLDEAQTWTPPAELQRFIEKAHKDGKKLVYIGFGSIVVSDPAALTKTVVESVLKAGVRCILSKGWSDRLGDPTAVKTEVPLPADILQIKSAPHDWLFRQIDAAVHHGGAGTTGASLRAGVPTVIKPFFGDQFFFGSRVEDLGVGICMKKVNVSLFSRALWEATHSERMIVKARLLGEQIRKENGVQTAIQAIYRDLDYAKSIVAERASKQGVPADDSVPLDEGDNEESWTFIGDESDPELQRQVQDWESPIRVSVGRASLRSMQGVEPVRKSSVRL

SEQ ID NO: 7557 - protein, 620 aa, Oryza sativa
MGSSGEAVAEWGKEGEGGLRHRWRAEAVGASSSFAEGMGEFVLRSMDARFSGSADADGFPSSRHPGFGHSKSTTATSDCSKGQEHVFVRSYSDRLLKCDLTLDMLSENEKIKIIENLVKIQNDGTLEVDVKRSALIASELSEIDAFGSLSRDIVEAAPGLSKSVPKLKIVILVVGTRGDVQPFIALAKRLQEFGHYVRLATHANFRTFVKSAGIDFYPLGGDPRILAQYMTKNKGFCLAGPTEISVQRKQLKEIIFSVLPACTEPDLDTGLPFRAQAIIANPPALGHLHIAEALGVPLHIFFTFPWTPTNEFPHPLARMPQSATYRLSYLILDLVIWWGTRGFINEFRKKLKLAPIAYFSTYHGSISHLPTGYMWSPHLMPKPNDWGPLVDVVGYCFLNLGTKYQPPQELSQWLQQGPKPIYIGFGSMPLGDEKKVTSVILDALRETGQRGIISRGWGDLGSFSEVPVDVFILEDCPHDWLFPRCAAVVHHGGAGTTAAGLVAGCPTTIVPFFGDQFFWGERIHAQGVGPAPIPIAELTVEALSNAIRFMLDPEVKSRTMELAIAIGNEDGVAAAVDSFHRHLPAELPLAPPPTDVKEEQLDFFQWFSQALEKCCFPFNP

SEQ ID NO: 7558 - protein, 810 aa, Eutypa lata
MERDSLEREATRTPPPEYSSIAPEIVLEAKSRLFHTLSRVAAHKDATRPPQATDDLRPTYTSQEKNHPLRLNIVIQVVGSRGDVQPFVALGSELRRRGHRVRLATHDVFDGFVRAAAGLEFYPIGGDPAELMAYMVKNPGLIPRMRSLREGEIRKKRHMVAEMLEGCWRACVEPDPATGRPFVAEAIIANPPSFAHVHCAQALGVPLHLMFTMPWTSTTAFPHPLANIEFGGSSLPVGTVNHISYLAVEWMTWKGLGDLVNSWRTKTLGLDPVPPSEGPRLTETLRIPFTYCWSPALIPKPADWPPYVDVCGFFFRDPPQYDPPAELAKFLHAGPPPVYIGFGSIVIDDPAKLTATILQAVRETGVRAIVSRGWSKLGGSDDDQGGYDYDKRNVMFIGDCPHDWLFQHVAAVVHHGGAGTTACGLLNGRPTTIVPFFGDQPFWGAMVAAAGAGSAPIPQRQLNSKNLAEAIRFCLTPEASVAAERLGAQMRTESGVKAAVDSFHAQLPMRELRCDILRDRAAAWSYRQGRTEIKLSKLAAEILMDNLKISGDELNRYDSMSIVIDPTRWDPVTGTTSSLISTFRGMVVSASDIVIKPVQVYHHSSQRNSLSSTRSEGMLDPAAIHNASKTTTRPNTSYKERDHDNPGEGTTANPSSPSTAQSLPIPSSSSFSSSSPSSHRSHHQHHHHHHQSKLAAEAIAGSAAGLGGFFKYFFKGMIIDMPLAATEGLRVLPRWYGGEVREIGPVADWKSGAVAAGRNFKYGVADGFADLVREPVKGGQEGGALGAVKGVGKGSVNMISKVSSVMELMS

SEQ ID NO: 7559 - protein, 1227 aa, Eremothecium gossypii
MLKGQKEGEAEPVPEGDKSGAGSSPSGVRKGLRVPLGLVSHSFSSLAKHKEAERRLTDEEESLSSPQDREDDAASPNIMAKSIAGLLTTASMYVGIGDIHRAEQLATGQPETDAGADETEDEMDEAGDETGDDADAPATGTDGEEESRPVSAQESRRSTLFELSIEPHPESHTAQASRTKNRRSRMTSKLRSKFNLDDDEELVREYPCWLLRDVLIQGHIYLTSRNLLFFAFLYKSNGSARLTGNLSICNNGLSISGISGKPTRYWTVLKDHTLSLYSSSTDLYFPVLTIDLRYVTKVQHCKNNGKDTRQFHITTESKTYTFYSDNEHSARSWSSALKKQVFATQNSDNDSMSVRIPLSNIIDVEEQAIVEQGLTLRVRVMESSDSFALDDYFFMFFNNAGSQLKELIQIQVANLEMLGAANVDYARHPLPPDTEASLPAVASDAAPQDAAIASEAAADAAAADTASHSPSTNAEPRARGRSTERAMAASAYLFGRLTSPRRDDAKQLSPSKVKLRFRSVADTLKLTTPRQPGSDAPQEPEPETTILESRPRLNYWSPRPFTTMRSMWNAQPVHYAAKGMSLFADDDELMIGDEAELLAADKRFKAHFSLTDDESLVASYYTYLNRSMPLYGKIYLGKTIMCFRSLLPGSKTKMILPLHDVENCYKEQGFRFGYFGLVVVIYGHEELFFEFASQKSRDDAEYVILKIIDSLKPVDGVMADDMSAGAYSLKAAQGRDATTDAKVKLFEQRISSVGYDIPIMVEDNPFYKTTITPKKFYTFGMLTIGSRGDVQPYIALGKGLLQEGHRVVVISHAEFGDWVRSHGLQFRAIAGDPAELMALMVQHGSMNVGLIREAASTFRNWIRDLLETAWEACQGIDVLIESPSAMAGIHIAEALQIPYFRAFTMPWTKTRSYPHAFIVPDQKRGGNYNYFTHVLFENIFWKGINSQVNRWRVEKLGLKKTNLEFMQQGKVPFLYNMSPTVFPPSVDFAEWIKVTGYWFLNESSNYVPPQALLEFMAKARRLDKKLVYIGFGSIVVKDPVKMTMAVVEAVVKADVYCILNKGWSARLGGQSQKSIEVQLPNCVYDAGNVPHDWLFPRVDAAVHHGGSGTTGATMRAGVPTVIKPFFGDQYFYANRIEDIGAGIALRKLNACTLSRALKEVTTNTRIIAKAKKIGQDISKEDGVATAIAFIYSEMAYAKSLIKAKRQEDKKAAKEAKQIQNEDSWLLL

SEQ ID NO: 7560 - protein, 409 aa, Streptomyces griseorubiginosus
MTAGSRGDVAPFTGLGHGLARAGHEVTLVTHGRFEPLAARAGLGFHALPVDPRAELESSRGRALHRSTTGVGKLVRVVAMARTLAVEMSDDLVAAARSSDALLLSGSVAPLGHAVAEGLGLPSLGLNLQPLAATREFAPPMLGTGSWGALGNRVAGTALNLAVEQVFGAALPQVRSRLGLPPVGTVTALRARDRQGWPVLHGFSPRVVARPRDWRRGLDVAGYWWPYDADAPLPDELRAFLDTGPPPVFVGLGSATVPDPARVSAAIVRALRLAGLRGVIQRGWAGLAATGDDLLTIDEVPHSALFPHMAAVVHHAGAGTTAAGLRAGVPAVPVPIQFDATFWAARLVALGVAPRAVPLRRLTAEALAAALTEATRDAGRRERARALGARIRDEDGVTPVLDAVNRLGR

SEQ ID NO: 7561 - protein, 812 aa, Aureobasidium namibiae
MRKTYTASTYSNDTLESSRHNTIRASLNDNDWNDSPPPYTLIAGDSNTLTGNDGRVSLDVNSKLARTLSVFIKDRPEQSPPEYQESEIEEFAQPPPLNIVIQIVGSRGDVQPFIALGNELQKSGHRVRLATHDIFRDFVTKPGLEFYPIGGDPNELMSYMVKNPGLIPSMKSMQAGEITKKRAMIREMLEGCWRSCIEPDDATGAPFVADAIVANPPSFAHVHCAQALGIPVHLMFTMPWTATKSFPHPLANIKDNKAEPSIINRLSYAMVEWMTWQGLADVVNGWRETLDLEPVPTTEGPFLAYTQNIPTTYCWSGALVPKPSDWGQHIDVCGFFFRDTPDYKPPQDLQDFLNAGSTPIYIGFGSIVLEDPEKISLIIAEAVRITGVRCVLSKGWAGLSNVSQSPDIFELGDCPHEWLFQHVSAVIHHGGAGTTACGLKNGLPSLVCPFFGDQPFWGEMIHAAGAGPKPIHHKSLSVDNLSEAIRFLTTPEAAEFAHLIAQRMSTESGVQTAVQSFHRNLPRQTIRCDILPHLPAVWTYKTSSKHTIKLSKLAAELLIDRLKIDGKKLGMNELRTYIIENKRWDPITGAASAAIGTTVEGNEDDSRSILSSHQDDADNKSLIATSAEAPNQKKQNQDGKRIAKGFGKAGNTILKGGLIDIPFALAEGLRNAPAMYGDKPRDFGPVIDWKTGGIVAGKGLVFGLYDGISGLVTEPVKGAKKEGALGALKGFGRGLGGMYWKPNAGLAGLLGYTMQGIYKSVYSAIHTGTRKTIAAARREEGILLLAKARGDQSFDLGQIVTAFEEIKKDDCR

SEQ ID NO: 7562 - protein, 1461 aa, Pyrenochaeta sp.
MASQDRGRERTSRKLTKKRRDSRQHLRAMSADMPERFKDGEDAHEDVTAPKRINTMSMNQSIFSMIARAGQQSQTDLGTMQEVDSGDSEDEATQRIPFHSLDGAARLSRLSSANDFQSLPRDVQDERVEKGKHMRALSENKLLRSLPRLKLSSKKEAHPDGQSMEQMSSSQFLPPRVSPEPPVSSPTNVRPPTTKAKFAPSEDIRTEKARAPGRRSSKHGSSAALAKNKGPVTLARRIQQIFEFEEVEEVISEYPCWLLQSILLQGYMYITQKHVCFYAYIPKKHHDISKTGYLFKRGRSKYNRYWFVLRGDVLSYYTNPAELYFPRNRINLQYAISATVLESKKRTEEEMIFVVTTDERNYQFKADSAASAKEWVRSIQKVIFRTHNEGNSVKISLPIQNVLEIEESSILDFADTVKVRVIDNDETFAIDEYFFSFFKNGQDALNVLRIMINDNEHHQAPHSRNERDATTPTLLGLPSRYETSTPPKFRGEKPHVRENVRATLSPLLAPHVGRANVSDVSPRSSVDLNRKSWDVRRSMDASRTFRRPSYETRRPSHEIRRSFSGSRYDRQRGTQPGDRSPLSPRVPDSASATLSLDPGTESSAAIQSMDESNVSASQILNRSDVFRAPEMQSTESSPSRKIDASARHSQDTTRSSGNGRPSVKPLALVKQGNNPPVQIGTHDLEDDVDATQAHARLSGSSSALQDIASYPYQKASGLAGFLRTRSKKMGNLLASESMGYYEKVSGMLAGGRKHYHTAEGLEPHDQVHGFEDDEDAAKAAENFREHFAFHDTEVLQSSFFASLQRVLPNYGKIYISGRYFCFRSLMPTSKTKIILPMKDIENVNKEKGFRLGYHGLAIVIRGHEELFFEFSKAEYRDECAITVLRILENNKYLQDEDSTSSISDSEDEAAKAEYDLLQQARQDIEAENQINVSEIVRAAEHDRIPLIFDDPLASFVDFKPTEPLTIVCLTIGSRGDVQPYIALCKELLKEGHKPRIATHAEFEPWVRKHGIDFAPVDGNPAELMRICVEHGMFTYNFMKEANSKFRGWLDDVCSSSWRACQGADILIESPSTMAGIHIAEALEIPYFRAFTMPWTRTRAYPHAFSVLEKKMGGGYNSITYITFDTIFWTAISGQINKWRRRELGLQNTSQNKMQASLRPFLYNFSPHVVPPPLDWPDWVRVTGYWFLDEGDSYEPPADLKAFIEKARKDDKKIVYVGFGSIVIDDPAALTKTVVDSVLKADVRCILSKGWSDRLETKDASKPEVPLPPEIFQIQAAPHDWLFTQMDAAVHHGGSGTTGASLRAGIPTIIKPFFGDQFFFAQRVEDMGVGIWLKKVNTSVFSRALWEATNSQRMIVKAKVLGQKIRKENGTQVAIQTIYRELDRARSLIKKHAKEDGDHTDEFDEDWTIVEDGEEIDMSHPFEAQQPLTGINQDASRLGGSQLVLGSVVMKGTRSEGVAYRG

SEQ ID NO: 7563 - protein, 1548 aa, Dendrothele bispora
MPRQPTLQPALHDPMAAPPVNTDPVTLGVDDSGTSPSRAKRLSNMFNLSASMPGSVSPPSGHRRIFSMSRKGKVKQQSDDSYTPSTSRPNSPMEDSPFITPPSPPLRPTRPPITSFQGDGSMRAGTQTLIQVLQAIPWTEDPDNDDDIVNHGLTPATDDSESEDEVKPTQPLASSIHTIYRPLARSRRLSLSRSRLPLHEQNETSLPPEPSSSDLDEPAPSDSEQEDTRDFEETTPKISYAPKPMSIQRNSTAAQISKLGLSMTRTGSMATVRLARRAKLAQKLREVFDLEDIEEVRAELPCWLLRSVLLQGYMYITNTYLCFFAHMPSREDQVLKSGSLNKKAQRTKRWIKHWFVLKNDALSWYQSSSDPYFPHGIVDLRYTISCEPIGEKDFRLRTNQKTVLLSADSVPSREEWVKAIRKVIFKAQNMGDSVKIAIPYSAILDVDKSSAMDFSETIEIKVYDKEASDHYSVDSFFFAYFHDLPTALDQIRDAVRAQRTEGGSGSNSSQSHTVLDTTQSRNQLSNSASGSLSTSPSNANGLPERPSSSSLSSFRIASLLRPFSESRSSGSGSGGTAAAAAAGGTSSSSNLSSNNHEERSPSEEFTHIAKRPDSSFVPVTTSGPSTPEDDEEVQTPIATQAQSHARILSSSSSVTPTPSSLSASVDHTYPPSTILADSALSHKKSGSSGSVIVSSASGVAAAVAGVGGSVSASSGGSAYTNWMSVPNWLKPPKPRLFGSASGASADAVPGVNPPGGKVREMYSESGRPGPGPISASSTSSTSTSVTTSRWTGDLAFSVLETPETAIDDDVVEKFRNAFAYDEKERLLGYFPGYIFRLLPVFGRLFISTNFFCFKSSGPLASRTRMTLPIRDILSAEKSKATRFGHHGLIIIIKGHEELFFEFGAEDKRDTFVRLLEAQIEDVRRRLKESGGVAVPTQGERDALILEEDSKPSIIDDDLISSRWNRPDLGGVSSTTTTTMTASPEMNPTMNMTDSLPAVMFTSASSTFLTFKPAKSMHFTMLTIGSRGDVQPYIALAKGLMADGHRVKIATHGEFKEWIESYGIEYGYVGGDPAELMRICVENGTFTVSFLKEGLQKFRGWLDDLLKTSWEACQGTDVLIESPSAMGGYHIAEALAIPYYRAFTMTWTRTRAYPHAFAVPERKMGGSYNYMSYVMFDQVFWRAISGQINRWRRNLLHLGSTSLDKMEPHKIPFLYNFSPHVVPPPLDWPEWIRVTGYWFLDSADVSSKKWTPPSDLVQFIDSAHQQGKKVVYIGFGSIVVSDPRTMTRCVIDAVVKSGVCAILSKGWSDRLHVKAGEASEPEEAIPKQIYPIASIPHDWLFERIDAVCHHGGAGTTGASLRAGRPTIIKPFFGDQFFWADRVEALGVGSGVRKLTVESLTEALINATTDRKQIDRAKLLGEQIRAEDGVATAIESIYRDLEYAKSLIKRSVPDTSEDEDDNEDSTVRHHHRKASDPQSGYTSGGSNWGTTSEDWSVISEQDDLRSSSAGSSHSGYRSRTRRTSITAAMLSVLPDSLVPGSPRKRTISNS

SEQ ID NO: 7564 - protein, 419 aa, Roseiflexus castenholzii
MRPTITILASGTLGDVRPLAALGKGLHDAGFAVALATHPQFAPLVQAQGLAFRSIGGNPSDLLLHDDAALTFDGGVGRGVVATLRYIRSAQAIYARMLDAAATACYGSALIIVSLASCWGQLIATTFGIPCVWAPLQPVTLTIRFPSPLLPVTLSLGARARRLSYTAVELATWLPWRTVFHRWRARAPGPRHMSLDPFALACTSSAPFVYGFSPHVVPPPDDWPPHHMVTGYWFLDHPAERLAPEIESFLAAGDPPIVIGFGSMGGRRPRDDAALALEALRLAQRRGILFGSADVARLAAGRRDVLVVPYAPHRLLFPRVAVAVHHGGAGTTAASLRAGIPTMTVPVGIDQPFWGMRVAAIGAGPPPLPRRRATPDRLAPAIMAATDDLIRVRAAAIGRLIGAEEGVARAVEVVARVMP

SEQ ID NO: 7565 - protein, 1349 aa, Botryobasidium botryosum
MRAGTQTLIQALQAIPWDSDRGEEDAAAPDDTSDEEDARFGKGNFVLASSIHTIHRPVAQARSPSVSNLFHHTGEPQLDDYFATLEEEGAEADFEPDAIRTLGPAPTTQTVSYSQTIGSPRGNLDTFKRELQARKASMATVRLKRRARLAEKLKEVFELQDIDEVVAEMPCWLLRSVLLQGYMYLTNTYMCFFAHMPAREDQILKSGMLHKKASRTKRWSKHWFVLKNDVLSWYQSSTDLYFREGNVDLRYAISCEPSGEKGFKLKTNQKSVSLEADSVPSREEWVKAIRKVIFKAQNLGESVKIAIPYSAILDVEKSSAMDFSETIEVKVFDKTENFMDSYFFAYFHDMDAALIQIREVFNMTRSTIVASGSGIQDTTLVGHRLSVHGTPSIASPERSQTTSALETKSSGGSGFSRLSSLLRPFSSSESTPTAPKSSSVPDTPVIPESDEFMHVPPHTGADNSRSSDATPTPHHIIAAHSAKSAPTVLRWVSSPDSSITTMPGSASTSMLQASQHTYPPPASPTTTPATLGTPDSQGSSWGVPGWLRTKRIFSGASSLVPSFVSSSSSPGEISEVYQANTHANTLDNSFVSETSDQEDTPNHLGYSILETPVGVAASLPDADVAERFRSSFALGEKETLLGYFPGYLFRGIPVFGRIYISNNYFCFRSSAPLAKTRMIIPIQDILATEKQKAYRFGHQGLVVIIKGHEELFFEFNSIERRDSCVTLLENQMDQTRKRLAAGEPALPTRGQQDALILEELEPSTYLNDSDPHPPPELMTESLPAVMFTSASASFLTFKPQKSMHFTCLTIGSRGDVQPYIALCKGLQADGHRTRIATHDEYKDWVEGHGIEFSPVGGDPAELMRICVENGMFTVSFLKETLQKFRGWVDDLLKSSWEACQGTDVLIESPSAMGGLHIAEALQIPFFRAFTMPWSRTRAYPHAFAVPERKMGGSYNYMTYVMFDQVFWRATAGQINRWRRNVLHIGSTNLDKMEQHKVPFLYNFSPTIVPPPLDWYEWIRVTGYWFLDDPDDSAKKKWTPPDSLVSFMRSAQAKNKPIVYVGFGSIVVSNPDEMTRIVVEAIQQSGVHAILSKGWSDRFSTKKDAQTGKETESPLPPTIYPITSIPHDWLFPKIAAACHHGGAGTTGASLRAGIPTIIKPFFGDQFFWADRVEALGIGSGVRKLTVETLATALRTATTDTKQIERARSVGATIRSETGIANAVEAIYRDLEYARSLIKRPHVDSDNNDDSTLTDKRRLSWSLSGTPRSQHRASMASSTESRGMSDEWCVISEEDNARNPSEEVGNPGNTDTVRAAGSGTRRRSIRRDDTVRPARPSTASTGTSVGSSFSR

SEQ ID NO: 7566 - protein, 1438 aa, Stachybotrys chartarum
MAPPPSSPAEASDAGENERLRRVANRLQKRKHQGSPQTPGLPEPLQDSDEDEADDGASSQGPPVFFNMNQSIFGLIAAAGSKVDFTNRFDGDSSSDDESPEPSVKPKPGLPQDLSQTTILEPPKKEKKHGHIRKISGSKLLKSLPSLPKRRSKSKREPSKLSIPIEDPSESSDAPDIPMPPFLPPNSERNRPPPVMSRMLEAKAEMASRPSFDIERFSGEHSRPGVGGDSSLLAQRLMEIFEFDEPEKVIEEYPCWLLQSVLLQGFMYITARHICFYAYLPKKAHVVAKSGYLSKSGKRNPKYNRYWFRLMGHVLSYYRDSTDLYFPHGQIDLSFGISARITDKEKEGVHFEVVTHHRTYNFRADSAPSAKEWVKSLQRVIFRSHNDGDSVKISLPIDNVIDVEETQMMAFAETCKIRVIDNDETYAIDEYFFSFFSFGREAINVLKILVEDAASGARTVDKVLGAAQRGTQDGEAKVSMSASRLHLDIDQAAGPKIPEPVKATLAPMSPTNQSTANPSPRPSADVSRTSLDAFRNFGRKSLDLPSVLESNPRRSFSGSRRSSSRRLEDKQMQKQSSSESYEPSSVEDPSYSQLIPSSVEDPSASQILQGSEVFQSPTMRRSLSANQARQLKQRENSAATEKGFPRASTSSQPGGRLDSRQHQQKAVTPSLQSISKMGTYPLQRAGAFAEYLNKTGKRMSSLLATESMGYVEKVSGMWKGGHKHYDEPAGLRPDDDDLEEDSEGKVQTSMERFRAHFALPETERLQATYFGYILRVLPLYGKIYISDKSFCFRSLLPGTRTKLILPLKDIENVDKEKGFRFGYSGLVLVIRGHEELFFEFGQGEVRDDCAITLLQSIETTRYLKEVGEVGNLEQEKREEEESARAEREALESARQEEFPQHELDLPHDTAALSNAPTILLDDPEGSFSVAKPAQGMKVTCLTIGSRGDVQPYIALCLGLKAEGHHPRIATHAEFQDWIEGHGIEFARVEGDPGELMRLCIENGTFTWAFLREANATFRGWLDELLASAYTACIGSDVLIESPSAMAGIHIAEKLAIPYFRAFTMPWTRTRAYPHAFITPERKMGGAYNWMTYIMFDNLFWKATAQQVNRWRNKTLGLPNTSMEKMQPNKVPFLYNFSPSVVAPPLDFSDWIRVTGYWFLDEGNKWEPPKELDDFIKKARADGKKIVYVGFGSIIVNDPAKMTKEVIDAVLRADVRCILSKGWSDRHAPKEDPSKPRPEEPPMPPEIHVIKSAPHDWLFRHIDAAAHHGGSGTTGASLRAGIPTIIRPFFGDQFFFAGRVEDLGVGVWVKKWGTNSFGRALWEVTRNERMIIKAKVLGEQIRKEKGVEQAIQCIYRDFEYAKDLVKRKAGKNAQQDNEEGEDDTEESWTFIGGDEPDPDMVTKKLSEGLGGSGGGGGGMGAGVTATRDKALGKQVLQSL

SEQ ID NO: 7567 - protein, 1090 aa, Serendipita indica
MIIEKNQSGNVPVDDPPPYTEHMNASDEELAGVIAADQDLTAYKAHGKGLDSKATIAQDGRINVTMNVKKALPGTLPTNYANEIREFAVDPVLLSTSSSDDAEDLGLREGGRVPRLSVVVMIVGSRGDVQPFLALGQELLRHGHRVRIATHGTFREFIKEAGLEFYNIGGDPHELMSYMVRNPGLMPGWTSLTNGDIPRKQRMLSEILNGCWDACSQPDIDGKPFIADAIISNPPAFAHVHCAEALGIPLQLSFTMPWCPTAAFPHPLVNISQSNAEPGLTNYLSYGLAEMMTWQGLGGVINEFRTSKLGLSALNVRSGPGLVDRLKIPWTYCFSPLLVPRPIDWQNHIDVVGFYFLNLASSYSPSTTLATFLASGPPPIYIGFGSVVVEDPEKVTQVIFEATRLAGVRALISAGWGGLGNTQVPPHVFILGNVPHDWLFTKVFAVCHHGGAGTTAIGLQLGKPTIIVPFFGDQPFWGNMVWKSGAGPKPIKPEKLGVERLKAAIEFCMTSAARDGARRLGEQIRAQNGVRNGVRSFHQHLPLLNMRCDLVPEELAVWWDPQHCLKLSALAAQVLNEEKLLNIHKLEIHRSKEYDTGLKSKTPFTGGVVEALLEPKKGLINTTVAIPRSIMHILESFTDEFAHFPALYGSAIREPGRPRDWKSGFKEGGKAFFFGLSDGITGLWTEPVEGYKSGGWKGALVGNMRSYANLAMRPTAGAFSLITYPVRGALMSLQRRDTATERHIRQLRVDQGRDASLQTPKSPRKPHFPPPVPPKDNIPAASTKSPTGEKSGAPHERVPGYDETLMPDNQTLYTDVDEGGLEGEEDMAESKKVKKDKKHSVGIVQREAHFERHLRSLHTVPLDTPGLRDEATRTVIIQAFRVAIKSENVKKRKKAMSKRVQWVITKGGAGTIADVTSQEAQYFAGGQITTAVLTTNANVGRTATGNSTDLDSPSMAAPSFEPHAPRAGPSRLVKPPPAPRAGPSRLVKPPPLPPRQSTSSTTASAQEWTREDEELFIKQLEDAKLRSLSGDVSGTAHADGVGRDDASKRDYEAQLLHATLEWSEAPHIPSSPGFHSPQQSSSSTSTSTPL

SEQ ID NO: 7568 - protein, 1541 aa, Chaetomium thermophilum
MDSSAQPLCRATASPRPSESKDESKQAHAPLSPSEPTATSAASAAAQDERTARRVSRKLQKRRRDGVHTPSFELPERLRETNDEADSDEEVLRPQAYPGGMFMNMHQSIFGLVAAVGRQANFSDRFESLSSDDEDDESPLAKTIAAPRQPSPWRPDHSSSSTTAMAQTTLLPLTARSSSDQHSSSTDTPTRHRRKISENLLRSVPGLSRFAEKLRPSKSSKEKSAKAPHDDSAADRSISSSKSSSAPPTGLAPAIEITRTEGMGEPIMSKLLEARAQVASRPSFELDRLTEEEGRAEGDDGTIGPSELAKTLKHIFEFERPEEVIQEYPCWLLQHVLLQGYMFITTRHIAFYAYLPKKANEVVKSGYLSKCGKRNPKYNRYWFRLKGVVLSYYRDPQDLYFPSGHIDLRYGISASITDKDKEGINFTIETHNRTYYFRADSAQSAKEWVKCIQRVIFRSHNDGDSVKISLPIENIIDIEETHMLDFAETCKIRVIDNDETYAIDEYYFSFFSYGKDAINLLKILIDDSSSQARDASDGPDKSLAASTRTSMSASRDQAQGRPGRLTEGVKATLSPMTPPRCASPVSRASQDRPRSSFDAFRPFRRSIDVAQSSELHPTSPSRSYSKTRRSFSKHRREALHEQQGSSDSFVQSVGDPSQASLSALVHSASSEDPSASQILRGSEVFHSPIFHRSSNKAEDTEEPVSAGIVRHDTDATVKPSTQQGTARQENAVGATATTPTLQSIANMGGYPFRKANALMGYLDRQSRRMSNLLATESMGYVEKVSGMWKGGGKHYDDPAGLRTDEEDGQEDPNERANSEARFREHFALPETERLQAAYFGYMMRVLPLYGKIYIGDRHFCFRSLLPGTRTKLVLPLRDIENVDKEKGFRFGYSGLVVVIRGHEELFFEFSKAEVRDDCAVTVLQSIEATRFLPDSSLLDGADSEDAQAAVAERDALQEARNEEFGDHELQLPRQASSVTEAPTILFDDSATSFLSFKPAQSMTITCLTIGSRGDVQPYIALCKKLLEEGHRPRIATHLEFKDWIESHGIEFAYVGGDPGELMRLCIQNGTFTWQFLKEANAKFRGFLDDLLATSWEACQGSDLIIESPSAMAGIHIAEALEIPYFRAFTMPWTRTRAYPHAFVMPGQKMGGAYNYLTYVMFDTVFWKTTAHQINKWRNNMLGLPSTNLEKLQVNKVPFLYNFSAYVVPPPLDYSDWIRVTGYWFLDEGDNNSKWTPPPELRAFIEKARSDGKKLVYVGFGSIIVPDRIKMTQDVIDAVLKADVRCILSKGWSDRSKNPDQQEQEPELPPEIFQIQSAPHDWLFRQIDAAAHHGGSGTTGASLRAGIPTIIRPFFGDQFFFGSRVEDLGVGICLKKWGANSFARALWEATHSERMIVKARVLGEQIRKENGVETAVQCIYRDLEYATNLIKAKARKNPSRRNTISSGTGEPLPAPANATASNGAEAGVGLGLELGTGGDGPSIDFDDEEESWTFVDRFDDHWDYQPQHHQHGFLRNPALTAPASAAKSLGSKVLGGAVGGGK

SEQ ID NO: 7569 - protein, 1455 aa, Cutaneotrichosporon oleaginosum
MSHRNTQEEQDPPAERSSTATPPEPSGDLSATMPPVPPPPIMTPAMEAQSIPSATFASSSVSDSEQVTQRDASPTTQPSDPDSTPIAPIPGMRFPHFPTPERHGTARPRDYRRIATADEASHDQKLSEMGSIRMGASALISALSALPRDDEESSLSSDEEVSYEVDVTTHLPVRPKMSRMHSSLQTLRPMASMSDPDTHNAHSQPTFLRTPPRSAHSPPHRARSPLGSGRSRPTSPESHHKLTFPYKENVITRRARAPSLTELRYQHAPASPEGAHERLPWQMRVGSSSTLKEIASDLVEPSQEVEEVQGSALGKPERGHLVVEREDTPRMLQRVFGLQEQEELIEEMHCWLLRSDMLQGYMYLTRRHICFFAKVGQTENDKTIKSGPLWKKASRTKLSNRYWVTLRNNVLSWYESPNDPYFPKGNVSLQYALSCDLVDETRFKVRLPERNYTFQSDTASNAQEWVRVIQKSTVKLQHEGQGVKLIIPWEAVYEVERSPTLEFAETIEIKVIDSEDSMSLDSYFFASFPDNDYAYELLQTLLRERPVSELPPPAAPSPKPAERKRDSGSRFSLTNLSAALPIPIPKFGSDKGDSSERVPIAPPMVLDLPYSGHDSFTSHSEADSEMSEDDEATRRRKEYPPRPSGPPPPGMGPASSGWAPADWIRRGSAQLFGTSPGSQPPPPRRRIHRQGSVTEVVEGYSFDSTDESESERRLSGARQSFSKLASTTPESPQPAQEDAIAIKFRKTFALPETEVLIDHISGSLYRVLPVSGRFFVSSNYFCFRSSGLLNKTKMIVPIRQLYGMTAQKAFRFGHHGLIVIIKGHEELFLEFHSASRRDELMALLEERMDDVREASQANKALEAAFPNAQGPFVNDMSDAPETAIGSMFSSTTSSFLQFKPEPMTIVCLTIGSRGDVQPYIALCKGLQAEGHTCRIATHAEYQAWVEGHGIGFAPVGGDPAKLMELCVDNGMFTISFLKEGLQMFRGWLDELLNESWSACQGADLLIESPSAMAGIHIAEALRIPYYRAFTMPWTRTRAYPQAFAVPEHKRGGSYNYMTYVMFDNVFWRAISGQVNHWRKTVLKIESTTFDKMAQDKVPFLYNFSPTVVPPPLDWTEWIHVSGYWFLDNADGKKDWSPPDGIVEFIDNAHARGKKVVYIGFGSIVVSDPHEMTRCVVQGVVDSGVCAILSKGWSDRGSRGKNDHPELTAITSHGADGIEFPPEIFSVDAIDHSWLFPRIDAACHHGGAGTTGASLRAGIPTIIKPFFGDQFFWAERVESLGIGSSLRQLTYEGLATALIEATTNERQIAKAKIVGQTIRAEDGVQRAIEAIYRDLEYARSLIRPEEENLPSRSTLSLSMSNSMSRQGSGSHSRGHSRASSLGDLLIHSHTRTRSTEGARSDESWSVVSDAGASLPSSPRREAHESDSDDHHHRIPVLGSLVSHISSAITRESSSRK

SEQ ID NO: 7570 - protein, 1510 aa, Ustilago maydis
MVHFRPLFGSRASVHDVHDSFGTTLEAVKTSESEHANPFEQHNKDANSPPHEQPVSPQSQQQQGGNDLAGLLNGAALVSRKDSQSKTQQRHNDDAAVALDSSAPPSEDAAGTDLNSPDNAAAWLKSRNQAETWDQHESARARSKLGRTLKKVDAKIRSTIGVNAPPTTQQIRSPYSIGKNDHLTSQDNFAVAELLDEASLETLQHLSTDEDDDDGDDEDEVEDEDEAEVQQNAQLRDQHVNDNDDGTTLREPQLRSDPDKIKGYVDELNQVKQGAKQRRSGSMDGARPGDTVRTRAPVEFSADEKIKAIIEEFGECASASEPNEPEKLIVDHNAVLMKTVLIRGNLFLTSRRVCFLAYIPDAASGNSNSSDYPHPGSVDIRAPSDPNVENPILQSGPAILHRLGKLRPKRRVWLELRKDSFNAYSASNKLYKPLLSARLANMHAVLPIDWSQPNVIRFVEGTTYSSVEFKTQEAALEWRKELEAAAFHARNTAEKVRISIPLERIVGIDAADFMRVAKVLHIDVLVGAVNDDEVLQIEQENRERTGRHQLDRTWSTSDAFFNCPKNPGFKCHVTQVTFGVTHNRSAFIDLLREALTPSRSIQHSTGYKNLLSISPAPLLDLQGEPDVEDVSTDSSYSSDDHKSSLADKFCDAFALPHRPDELHIVKAELVRTLHTHGTIAIGLDYLLFWRRAVGRELKIKVPLNDLRGVDTYRSMFWHHFGLVVHITAHSDMYFDFASKDNRDMTLHKLAGFIQAKRKQSKEGTASHDAPATEAKGDHKSPEAVQNMPGKKVAAEALLHDDESEVPVFEPDVLAYLPKVVNMDRNAMRDSIRISPMRIYCLTIGSRGDVQPYIALCKALKEHGHTPVIVSHPEYRSWVEGHGIEYRGVGGDPAALMKLSVEHRIFSPAFFKESIGKFRVWLDELLRECWEECQGADLLIESPSTMAGIHVAEGLSIPYFRAFTMPWTKTSAYPQAFSVPSIEMGPSYNSSSYTLFDQVMWVATCGQINRWRKHMVGIGPTDMSKLDADSVPFIYNFSPAVVPMPNDWGDRVKISGYWFLDNPESNWTPPKEMSDFLERARKDGKKIAYIGFGSITIEDAEEVTANIMKAVHQADVRAIVAKGWSGRGGSKTKKKKKQQQHKPQLEHKDSAASHPEGEDAATEEEHEPEIPIPDDVFVVESVPHDWLFPQIDIAMHHGGAGTTGASLRAGLVTLIKPFFGDQFFWANRVQKLGAGARVNGLSVSDISDALKSAASDRVMVEKAQGVGEKIRSENGVATAIEFLYKNIPLANRRTQRKLEREAMHESSTDTSHIRTNPLRRLSSHHRQNSSGGERKDSQHKQQRGATLPTVSTLCDASSSSPTSSREEQAFHRSATIFESPANEAGTPQSAGSSSPTKTSSFLATLSSLNPLPASMTASLKETITLNSSTSDTTADGEEAKWFGERSNTSTTLPGALNVGEESEEHKMNRLKGYKNAKAEDIRRRKLLLERLERERAEKQQNQPQRKEEDEN

SEQ ID NO: 7571 - protein, 423 aa, Mastigocoleus testarum
MNIFILTAGSRGDVQPYVALGQGLREAGHLVTVCTCSSFESFITDHGLNYGYMNNDFIKLVDSEAGREMMESGGTFFGLIGAMLKLLKVAKVINKQMLRDAWNSAQAAKPDIIIFHPKVLAGSHIAEKLGIPAIMAVLAPAIVPTSDSVAIGFPNLKLGGWYNKLSYKVLHWGYHNYDDIVNEFRQDVLGISKFPKSTSPIETVNGKPIPVLHGYSGLISPRPKDWSNTAYITGYWFLDRKDDWRPPAELVDFLEAGEQPVYVGFGSMAGRNPKKMANIVINALEKAGVRGIIATGWGGVDARILPKTIFKIDKIPHSWLFPQMSAVVHHGGAGTTAAGLRAGCPTIVCPFLVDQPYWGERVYTLGVGSKPIPQNKLTATKLAKAIREVITNQIIRQNTETLGEKIRKEDGIANAIAIIESFI

SEQ ID NO: 7572 - protein, 1368 aa, Rhizoctonia solani
MSATTSDLRRNKNQASDSRPSLSIMGLGKQDEFGIGSMRMGTQALIQALQAMPWDEDRDEDVPESAAKRGRGKPRREPVSPDSSDEEEQAKADFVLASSIHTIHRPVAHSRLATPSFNQSMHYGINPPLEAAEDYFSNPLSADEDDGLRDFDDAATPEGLPNPFKDPSRMRLHLPADKQPKSEGKRRMPAPVRTASMATVRMKRRVKLADKLREVFGIPEIKEVVAEMPCWLLRSVLLQGYMYLTNTHLCFFAHMPAREDQVLKSGTMSKKAQRTKRWNKHWFVLKNDVLSWYQSSADPYFPHGNIDLRYAISCDAHREKGIRLRTNQKTITLQADSVPSRDEWVKAIRKVIFKAQNMGESVKIAIPYAVIDGVEKSSSMDFSETIEVKVIDKEENYALDSYFFAYFRDLPAALEQIQQVLSDYQATAPPGEAHLTDTTQANRAPVQHLDRTASAPASSHQNDSSSGFRISSLLSLRPFSTATGSEETHKGSTISTLNTNEGVSIQHGPASPEGAALGTSSILSEASVHTYPPSPSHQPPPSTHSNRTSISSNWSVPGYNWLRGKRLFSTPSSIDWGSRSTEGNVSEVVSSPRLDQSELSVSSDGNNLGFSILEAAEDGKAADAGLEEKFRSTFALDEKEALLGCIPGSLFRVLPVFGRLYVSTNYFCFRSSQPLTRTRMMIPIRDILATEKQKPFRFGQHGLVVVIKGHEELFFEFGSVERRDACCSLLEMQKDVLQHQALSPISPTPTQGKRDALILEELEPSMLISDDDPRPAPEVLASDAPVMFASTSSTLLTFKPDRPMHFTCLTIGSRGDVQPYIALCKGLQADGHKVRIATHKEFQSWVEGHGIEFALVGGDPAELMRICVENGMFTVSFLREGVQKFRGWIEDLLETSWLACQGTDVLIESPSAMAGIHIAEALKIPYFRAFTMPWTRTRAYPHAFAVPERKMGGSYNYMTYVMFDQVFWRGISGQVNRWRRHTLRLPSTNLDKLEQHKVPFLYNFSPTVVPPPLDWYEWIRITGYWFLDDPDDSGAKKWTPPPDLIKFMETARRDNKKIVYIGFGSIVVSDPDAMTQCIIEAIKLSGVYAILSKGWSDRLSTKKSNTEPPPTYPPQIYPISSVPHDWLFSRIDAACHHGGAGTTGASLRAGIPTIIKPFFGDQFFWSDRVEALGIGSSVRKLTVENLTAALRAATTDVKQIERAKLVGQSIRAENGVRTAIEAIYRDLGYATELFRKDTHVDLDADGSEDETIQESKTPAARRSSLDPVMFGSDSSCGSGRGNGEDSSWSVISDHPPPERVRVESMGSDKRGGGESGDSSTGESRTPNAGQPSGSRGLSNLPAIGLALLQDTLTAYSPSARGEVPNGKP

SEQ ID NO: 7573 - protein, 1264 aa, Lachancea sp.
MAKKQTPGPGSVILTNTDGLGRRGSTSQRRWMRSLSPVGKLYHSSASLMHFPSKVAGGERSSLAASDGEESNTIETGNRDLEPDLACPRGMAKSIVGLLTTASVYAGMGDMEQAAEICEDDSSAEEEGDDSTVSKSAKNKEQHEHDANEENQELELEPSDNVSPHGDENSTASDSAIDLDSLTDTVTHVSKKDTLFEISVEPNHDATSVVSTSSGSRQLKIYRKLLSRFNLNEAEDEFVLRQSCWLLKDLLIQGHIVLTSRHVLFFAFLPKSTGTAKMSGNLSTFSGGLRGRWSRYWAVLKDHTLSLYNSRQDLYFPLLTIDLRYASRIELDNRGHGATGTFRICTEAKTYKFRADSHFSSRSWSSALKKQLFATHNSENDSMSVKIPLVNILDVEEQMVVAQSVTLRIRVLESPASFAVDDYFFMFLGKSEMNLRQAINAQLSKMEKPPLRQSDLSHLSPPVTELNDGQSEVLDKTARGRSDSNSRKIIRRVLSPVSKVRRPSFPVHVHISQKYPQRALSLLKSKNESESSTKTSSDDTFGGLSHHTLEDTVELGSPQQLQVTADEISDSDESAQTSEDNKLGTSKLASWTPRPIKNMGSMWGAHPVHYRHDLADIFPDDDQYLANAKDQLVASKRFKSHFSLKDDEILRAAYYTHLNKNIPVYGKLYIGTSVICFRSLIPGNKTKMILPIEDLENCYKERGFRFGYFGLVLVIHGHEELFFEFSLPSSRDDAEYVTLKQLDLTKLDVDSPITTVDGISQKLRTADISAEQKATDAGKLRLFEDKINAEGFDLPMMVEESPFYKTSITPKKSYRFGLLTIGSRGDVQPYIALAKGLLKEGHRVTIISHSEFGSWVRSYGIKFREIAGNPAELMSLMVQHGSMNVGLLREASSKFRDWISQLLRTSWQACQNLDILIESPSAMAGIHIAEALQIPYFRAFTMPWTRTRAYPHAFIVPDQKRGGNYNFFTHVLFENIFWKGIGGQVNKWRIETLGLKKTNLMLMQQNKVPFLYNISPAVFPPSVDFSEWIKVTGYWFLDGKDDYSPPKALADFIAQARGQGKKLVYIGFGSIVINNPKKMTKAVVDAVLEADVFCILNKGWSDRLDDNSSSDDIEEPFPECIYSSGSVPHDWLFPQIDAAVHHGGSGTTGATLRAGLPTIIKPFFGDQFFYAGRVEDIGAGINLKKLNSKTLSRALKEVTTSSRMSHKAQQIQQEIAKEDGVETAISCIYSELEYAKSLVQAKYQEKQDDMKDLGSPEENSWFLV

SEQ ID NO: 7574 - protein, 1520 aa, Tremella mesenterica
MSQHNKPPSPKVPPFPPQAIHSDDRRDHDSTAEDLINIAATHIMPVPAPSSSNSPQDKRHQVQAESEESQVVAHARDDREEEPIMAGTPLDELKTPTLERLKLLDLDPETLQPPTSGIEPTHVGTIQEDDAAGDADDEAADELPTLSAPARLGLGTSALISALHALPWDDEEDEGESSSNSSDIEARDRRSPEDSVPAPTKQKQQRPKAPSLQFPFRANTIARRARSPGLDELQYQFAKSGSSGLQAHDNDVPDVPPPKGAFSRRQRQDGDQSSESSSLTDNSSRRLVARRIEKEEHLGAAEEHEEILRTLSDEESDDSQEDVAKKHTQGKLLRNDNTEAALREDQDEEMLEERMSVNPGEKKRVRKERLAERLQEVFGLEEREEVLEELRCWLLRSVMLKGYMYLTPRHICFFAQMPNKENVVVKTGPLYKKATRTKLNSRFWVTLKNDVLSWYESTSDPYFPKGNVSLQYAFACEPVDDTRFKLRTSERTYTFSAETQDGRDDWVKAIKRVMFKTQHEGESVKLIIPLEVVLEVERSPSLEFAETIEIKCVDLEDQMSVDSYFFASFHDLDHTINVIQRLLDARPPIDFPRVDSDLVARVAEAEAEERARSASDSSTNLSSLGSLRKLGSVLKPFVRSSDKVNEVGNESHSRLSLPSMPGLPRLSIPFRPLEISDEDMSEGYPPRQSGPVPAGLGESPSGWAPSWVRKPTAKLFGSSPSSRSFGKSPESTSTLTTSPARMRSGGGKKPVVTEVVEPVIPFNRDSDDSCSEEDSTFRGHGGSGRPRMSFSSDASIGSQMGDRPKSDYSMMEQSMTEKKETDETRRKFLDVFSLPDTEELLDHFPGYLYRVLPVSGRFFISTNYFCFRSSQLLYKTKMIIPLRDLYGLKAQKAFRFGHSGLIVIIKGHEELFLEFSSSSRRKACITLLEERMEAVRLQTDQGEPDVARIRARIMEDLDESAPFDPSNAARPSSPSSLFESTASTLLEFKPESMRITCLTIGSRGDVQPYIALCKGLQAEGHTTRIASHGEYKEWVEGHGIEFASVGGDPAELMQMCVDNGMFTVSFLKEGLQKFRGWLDDLLTSSWKACQGSDLLIESPSAMGGIHIAEALRIPYYRAFTMPWTRTRAYPHAFAVPDHKRGGSYNYMTYTMFDQVFWRAIASQVNKWRKNTLCIESTTYDKLEQHKVPFLYNFSPSVVPPPLDWTEWIHVTGYWFLEKADEHAQKKEWCPPERLLHFMEEARQANKKVVYIGFGSIVVSDPEEMTRCVVDAVVESGVYAILSKGWSDRGTKAKDTGTSEGADGIQYPASIFAIDSIDHSWLFPRIDAACHHGGAGTTGASLRAGIPTIIKPFFGDQSFWAERVESLNVGSAVRKLTSETLASALSKATTDEKQIAKAKVVGEMIRRENGVTRAIEAIYRDLEYAKSLIKPLPEAPRRDSKSILRPLTSHTPDLNLFRSRSKSLSKASSHSPDSIELLDHRPTSVRTMSPVSERDHSRQISGGTQHSSDSSWSVVSDGIRF

SEQ ID NO: 7575 - protein, 1348 aa, Serendipita indica
MEGPRPHLQNPIMGTTIDTSPKALGLVLDARDEEDSPGVVDRIIRKSSQIKKSGHRKLNSISRKAKGPPANDEHPEERVDELEKTRRESKVSLDDAGSSYPPSRPSLNFRGEGSLRMGTQTLIQALQAIPWAEAEGGVPDKDDSDENDADKPAFTLSSSIHTIHRPVARFRRQSTAVDTASPENDSPDEEDEDDFDPDALPLGASAPRPPLHTNATARQSELPTRTIMRRSTSLATVKVQRRARLAEKLKEVFDVPEIGEVIAEMPCWLLRSVLLQGYMYLTNSHICFFAHMPSRENQVLKSGSLSKKAQRTKRWNKHWFVLKNDALTWFHSSADPYFPHGVVDLRYAIACEPHGEKGLRIRTNQRTVNLDADSIPSRDEWVKAIRKVIFQAQNHGDSVKIAIPYSAVVNVTKSKAMDFSETIEIKVVDKEDDCLDSYFFAYFHSIDLAVEQIRAALKEAKESPMIKLVQDTVKDTTSHKTSTALPLVHELDKVVSAPTPSSTSSTLSSVRDSVRDKLSTPVGKLNSLLRPGHTTPDSRPTSTMSTESSPITVTASPKSAAEKMPGDHTYPPSLVHHNVSDSSTKSSWSVPVGVPNWIKNSSKHFFTSSPEVGPGTVKVDTKDVGGIHTSAHQSTGDHGDFGFSIVDGLDSALDPATVDKFRAAFAFDERETLLAEIPGYLFRVLPVFGRVNISSNYFCFRSSQPLTKTRMMIPIRDILSTENAKAFRFGHHGLAVVIKGHEELFFEFSSIERRNACAALLDKLVDELRERQRSGLPTRPALERPESLLLETTERRSSVDTDDDTEPKPPPEGSDNIPAVMFTSVGSTFLTFKPQESLRFTCLTIGSRGDVQPYIALAKGLQADGHKVKIATHLEFKDWVEGHGIEYGYVGGDPAELMRICVENGTFTVAFLREGLAKFRGWLDDLLKTSWEACQGSDVLIESPSAMGGIHIAEALQIPYYRAFTMPWTRTRAYPHAFAVPDTKMGGSYNYLTYVMFDQVFWRAISGQINRWRKQLLGIPATTMDKQEAHKVPFLYNFSPTVVPPPLDWYEWIRVTGYWFLDDSENSLEKKWEPPAGLVDFMEKARSQKKKLVYIGFGSIVVSDPDAMTKCVIEAVRESGVYAIMSKGWSDRLSSKKHDTHAAEAVPPLPEQIYNITSVPHDWLFRQIDAACHHGGAGTTGASLRAGIPTIIKPFFGDQYFWADRVEALGIGTGVRKLTVENLTAALITATTDVKQIARADAVGKAIRSENGVANAVESIYRDLEYARSIIKRYSHETPPQEETDTEWEVPHKPGGEGSTRALSDDWNMVDEAHPENSKEAGTLSPLKRMSMGLSALTLHPKATNIST

SEQ ID NO: 7576 - protein, 1738 aa, Rhodotorula sp.
MAQVPHEASQRPGTPPAAVEPQRPSAARSHSAVVGPDADYERHTQDLKDDANSDELAGRGKGGQRFGGMGHAGYRDGQPRDEEETQPGGMTAQAGAQQPATHTSTAGTGTRIVRSPSPASSLSGSSSDSDTSDDALSSDEDSRAAAAAVATQQQQRKNRTSSGLIDTEAEMGIGGAGYGKMAVSLDEGEQRRREKERRDDDAENQSKGSKFWPGGSKSYSGGGMGPGYMRMIHALAEEDKEAERKARHERRKHRHHLRKHRHGGDHKKDGEAEGEKSPSDEDHAKFASPPEHAATTPTLARTEECELKESDPARDFAAAEQRKKARKQEKRDRRAERERDGETGMASSSLLAIHRPIEQRRRTMSDVREADAVREADEERERAPVDQAKVDEIEREQGEYEKKYPGMGSRQATSTSVASVDTVERREKLSEKLMDVFGLDEAEEVVAEYPCWLFRSILLQGYLYITAGHLCFYAYLAQKEGATIRSGSLSVRGSKTRRYHKHWLILKDNILSWYPSSADPYFPDGHIDLHYCISVEESTFHKHHFKVATADKRWHFSADSEASRNEWVKAIKKVVFRCQNEGESVKIAIPLETIVDVEKTSSLEFAEMIRVRVYDADEGYSLDEYYLSYFKDLDGALNRINAVVDAFRIHHPQGQGEKAPLPPAAAHEDVEDTTKNTTADIGEVDDYRTHPRQDEGQQQQDDHELKRSRSRSKSIGARVSSLLSGKSRNKSTPFDQKSVSDSASVKSVPASVKSVASSTSTGSAHASKRKGPAWLPPPKAPPILIPDSAKAPPTGAPTSGSVSTLRPPQTEAEPQGDDVAVEGASPLVAMAGILPASVGDSPVMESDGTCPNLAPTVENQPHGSGAAATSDETLAPRDPMHAHQAHTYPPGPAPARDSDADAAHPPARSSTLSKIFSGPGSGGRKILETVTSSSLPGRRKRKESVSDRSLTEEPRTVKEVDEFRKTFGFGDKEELLHDWPAFLFRGLPISGHAYLSDNYFCFRSAGLLATRTKMILPIRDVIGVSKHRSYRIGYSGLVIVIKGHEEVFLELSSAERRDACMNALEEQRDLVKQRKKLEKEKGDKQDDEHRELRELVDLSATKDTELSSPDMPHPQSEAIPSQPPIMFSSTTSDFVTFRPEKPLRFTCLTIGSRGDVQPYIALCKGLMAQGHHCKIASHAEYQKWVEGHGIDFAPVGGDPAELMQLMISHDFFTISFMKEAVSKFRGWLDDLLDSAWEGCQGSDVLIESPSAIAGYHIAEALQIPYYRAFTMPWSRTRAYPHAFAVPEVHMGGGYNYMTYTMFDQVFWRATSGQVNRWRKNTLKIRATNLEAMQQHKIPFLYNFSPVVVPPPLDWRENVHVTGYWWLDNPDDSKAKKWEPPQDLLDWMEEAKSKNKKVVFVGFGSIIIPDPLEMTRVVVESAEKAGVYAIVAKGWSDRQKGDEGEDSEEVKKKREESEEKHRKLMDKPFIFPVKSIPHDWLFPRIAAAVHHGGAGTTGASLRAGLPTIIKPFFGDQHFYADRVETLGIGSHITNFTVDNLTEALKKATEDEKEIERARLAGEEIRKEDGVATAIECIYRDLEYARSLVPKPSERGKDGVPLESAPEDNDDDESDDGLTSSAEEAMEEEKEAEKEKEVHDEDDSAKDGPHSESSQVSSSGVTSGTAASQLNESRTTSSDEGWDVMSRGSAVDSTSRASSTTRPEAAAESGRAADDQESQTGLLGRTLGFLGKPIKNTKST

SEQ ID NO: 7577 - protein, 409 aa, Streptomyces scabiei
MTAGSRGDVAPYTGLGHGLVRAGHEVTLVTHARFEPLVAGSGVAFHAMPVDPREELESARGQGLHRSSTGAGKLYRAAEMARSLVGRMAGDLVAAARASDVLLLAGTLAPLGHTIGLGLSIPSLGVNLQPLAPTREFAPPMTGVRSWGPVGNRAAGHAVNTAVEWIFTEEVRRLRAAYGLPYTGRAAARRTRERLGWPVFHGFSPRVVPRPGDWRSGLDVTGYWWPYDREDRLPAPLLDFLDAGPPPVFVGLGSATVPDPGRMSGEIVRALRAAGLRGVIQRGWGELRGEGEDMFTVGEVPHSLLFPRTAAVVHHAGAGTTAAGLRAGVPAVPVPVQFDEGFWAARLVALGVSPGAVPLRGFTAAALESALRRATTDPSYGRRAQALAGELRAEDGVEPVVAAVNRLAG

SEQ ID NO: 7578 - protein, 1264 aa, Lachancea nothofagi
MPKTQQSDPADANIADQTVPVSNERPSQNRWLRSLSPVGKLYHSSAGLVHLRGRNSGAEKSSLLTPSSNEPGSLDSGNKDQDPDLARPCGMAKSIVGLLTTASVYAGMGDLEQAEGMCGDEESNKREDEDEDQEEASEEYEDEVRKLDEDQLQAVEAERVGTCGSERDDGSSDSLRTASDLDSLADTVTHISKKDSLFEISVVSNNDAQSIASTDSRSRQSKIYRKLLSRFNLNEAEDEFVLKYSCWLLKDLLIQGHILLTTRHLLFFAFLPKNTGTTKMSGNLSTVAGGLGGRRIRYWAVLKDHTLSLYNSLRDLYFPLLTIDLRYASRIELTSFDEGATGDFKIHTEVKVYKLRADSKYAARSWCSALKKQLFATQNSENDSMSIKIPLANIIDVDEQIVVAQSVTLRVRVLESPQSFAVDDYFFMFLNKKDIDLKEIINDQLSRLERTQHRSQDTEDSFPFEASTTDATTGLTKRVGRGRSTSSSKKIIKRVLSPVARVHRHSFSVSMPFNPRSPQRVMGLLRSKTETQGDKSTLGTDAEQQNSLDTSLSKNSDSLSSERVEHPLQSTFDDETSSEVQDEDKGRGLKLANWAPRPIKNVGNMWGAHPVHYKYSEKDMFSDDDQYLASSQEQAIASKRFRSHFSLRNDEMLRAAYYTHLNKNIPIYGKFYLGSSVICFRSLIPGTRTKMILPIKDIENCFKERGFRFGYFGLVLVIHGHEELFFEFSLQSSRDDAEFVILKQIDGLKSEAEKSAGEVDGISQRLKEADISTEKKITEAAKLRMFEDKINAEGYDLPMMIEESPYYKTSITPKKSYKFGLLTIGSRGDVQPYIALGKGLLKEGHRVTIITHAEFGDWIKSYGLDFKEIAGNPAELMSLMVQHGSMNVGMLREASSRFRGWITKLLETSWSACQNLDILIESPSAMAGIHIAEALMIPYFRAFTMPWTRTRAYPHAFIVPDQKRGGNYNFFTHVLFENIFWKGIGGQVNKWRIETLGLGKTNLDLMQQNKVPFLYNISPAIFAPSVDFSEWVKVTGYWFLDAKDDFEPPAALIEFIARAKTTGKKLVYIGFGSIVISDPKKMTRAVVDAVLEADVFCVLNKGWSDRLEGESEGKAEEEFPSCIYSSGSVPHDWLFPQVDAAVHHGGSGTTGATLRAGLPTVIKPFFGDQFFYAGRVEDIGAGISLKKLNSKTLSRALKEVTTNSRIVKKAQQIKREISKENGVHVAISCIYSELEYARSLVMAKNKDRKSKNIASPEENTWFLV

SEQ ID NO: 7579 - protein, 1131 aa, Sugiyamaella lignohabitans
MPRNQTDSIKSGSLRKKSRKTPSFSKFWFVLRSDSFSYYTNATEMYFPAGTIDLRYAVKAEIVHHGLEKEQLKSSTFSIITETRTYTFKADSAKAAHEWVKALQKEIFRSRNEGDYVKIIIPLVNIIDLEDSPIMNIATTLKIRAIENDETYAVDEYVLAFFTKGKEVVDAIKVSMKELGVSGIAVDDSSSTDLAAKAGSLNLEEIRENRPKLLKTQTSLKVKSPMVAAAASNVASTPKSPVDSLKKTNSSVSLSKKVRNLFNDNEGSTTPGSPHLSPRIGPLKSTSSKEVIKDWTLDSPSGLESPPGESMPSRQKSRPGTPPDQLAVSAAMAALQSDRDRKSHEQEEVYPTGHTTGHIRISSSIGQIFKKEGGSGSGASTPGEDNKSYDFLSASESNQIQYESSDKKKKKSANIVHKVTDMWGGGRKHFRDPNQAGGFRDDRHLVSEEDGAESNERFRAHFSLGETDNLVATYFCHIQKAIPIYGKMYLSNEHLCFRSLLPGTNTKMILPLHVVENVTKEKGFRFGYSGLVIVVHGHEEIFFEFGSSNNRDDCEIMILREMDRSKNRSIIRQSGSDYALRSARLITYEDALRNELPPGINVPPVILEPCNDTSNDFFVGKAKDSLRFTLLTIGSRGDVQPYISLGKGLLKEGHKVKIATHAEFKPWIEKHGIEFAEVAGDPGALMKIMIEHGMFSVSFLREAAAKFRDWIDELLLTAWKACQDTDVLIESPSAMAGIHIAEALKIPYMRAFTMPWTRTRAYPHAFIVPEQKMGGSYNYLTYVMFDNVFWKGISGQVNRWRKKTLHLPRTNLDLLQQTQVPFMYNVSPSVLVPPVDFPSWIRVTGYWFLDEGGEDYVPDKSLVDFIAKARKDDAKLVYIGFGSIVVSNPKELTKAVVASVQKAGVRCILSKGWSDRLGKGDASVPEVELPPEIYQIKSAPHDWLFPQVDAAVHHGGSGTTGASLRAGLPTIIKPFFGDQFFYAGRVEDLGAGVHLRKLTVNQFSKALWEVTHNERIISKAADIGKRIREENGVDTAIQVIYQELEYARSLIKDGNVPVGRKIPTLMDVAGLPVKLVQRATAPLPSLPICHDDSDQEHDEERDKKSNSSQEDDSTHTDGSWTVVDTESKEQE

SEQ ID NO: 7580 - protein, 1324 aa, Parastagonospora nodorum
MASQDRGRDRSSRRLTKKRKDIGRDTRGLSLDIPERFKDGDDAQEDVTAPKRSDAMSMNQSIFSIIARAGGQSQVDLGTMQEVDSGDSDDDGKGKTLHDRLDGAARLSRLRTANDFRPPQEDSRAEKIGSGKHRRALSENKLLRSLPKLKISSRKDVRSDGQHTDQMSSSQFLPPRPSTETPSETHKRGDALKGKARATTGDEIHVEKQRKSERRGGQGSSVGLAQSRGPVSLATRIQQIFEFEHAEEVISEYPCWLLQSILLQGYMYITQKHICFYAYIPKKHHDVSKTGYLYKRGRSKYNRYWFILRGDVLSYYTNPAELYFPRNRINLQYAISAEVVENKKKGEYETIFTVTTDERTYQFKADSAASAKEWVKSIQKVIFRTHNEGNSVKISMPIRNVIEIEESSILDFADTVKVRVVDNGETFAIDEYFFSFFNRGQDALNVLRIMINDNEHHQVSTENQVNPTPITAPLKTSNRHSLVVSPIVPDDTPRIKENVRATLSPLPNPNVGRSSISDISARSSTDVPRKSWDTNTSLLPASTEAEEDTDPSQTLPRLSNSSSALQEIASYPLQKASGIAGFLRMRSKEMGSLLATESMGYYEKVSGMLAGGRKHYNTADGLEPHDQIHGIEDDDDAAKAADNFREHFAFPESEILQSSFFASLQRMLPNYGKIYISGRYFCFRSLMPTSKTKIILPMKDIENVNKEKGFRMGYHGLAIVIRGHEELFFEFSKAEYRDECAITVLRILENTKYIEEASSSSGVDSDDEAAKAEHDLLQQAREQSDTHEQIDVSEIARAADHDRIPLIFDDPLASFVDFKPPEPLTIVCLTIGSRGDVQPYISLCKELLKEGHKARIATHAEFEPWVRKHGIDFAPVDGDPAELMRICVEHGMFTYGFIKEANSKFRGWLDDVCSSSWRACQGADVLIESPSTMAGIHVAEALEIPYFRAFTMPWSRTRAYPHAFSVLENKMGGGYNNMTYQLFDKLFWTAISAQVNKWRRRELGLQNTSQSKMQANLRPFLYNFSPHVVPPPLDWPDWIRVTGYWFLDEGDTYQPPADLAAFITQARKDEKKLVYVGFGSIVIDDPAALTKTVVDSVLKADVRCVLSKGWSDRLATKDASKPEIPLPPEIFQIQAAPHDWLFKQMDAAVHHGGSGTTGASLRAGIPTIIKPFFGDQFFFAQRVEDMGVGIWLKKVNTSVFSRALWEATNSQRMIIKAKVLGQKIRKDNGPQVAIQTIYRELDRARTLVKKHVKQDDEQTDEFEEDWTMIEEGQDVDVSAHHFEAQSPLVGMNQDAPRTGGGSLVLGSMVMKGAQKRNSESAYRD

SEQ ID NO: 7581 - protein, 1159 aa, Schizopora paradoxa
MTRSASLATVRLKRRAKLADKLKEVFGLPDLHEVLAELPCWLLRSVLLQGYMYLTNSHLCFFAHLPSREDQVLKSGSLNKKTQRTKRWVKHWFVLKNDVLSWYQSSSDPYFPHGVVDLRYAISCEPMQEKGFRIKTNQKVVQLMADSVPSREEWVKAIRKVIFKAQNMGDSVKIAIPYSVVMDVDKSSAMDFSETIEVKVLDNEDKVGLDSYFFAYFQNISAALDQIREAVKAYKPIAVSPSALEHVQDTTGVKLVSHPNLAMERTPSEPTRSSGYGLRLPSLFRPFSSENPMPPSHQVTQSQWQSSGEFTHVLRPSSTIVASPSTITPNATPRLSQASTVESTSRQSRVLTESVLEGVKISDFHTYPPSPSPSTELAPLPTRDSGSGSSWGVPAWLKGSTRRVFSVSSSSSGGTVGRRGVSEVVSAGMGDVSTELGFSVLETHEAAEPEVVEKFRTTFAFDEKETLLGYFPGYLFRLLPTFGKLYISNNFFCFKSSGPLATRTRMVLPIRDILTLEKSKAYRFGHHGLVVIIKGHEELFFEFSSSDKQSAFYELLNRQMEDSRRRALSADTQALIARKQDHVILEELEPASLFGEENPKPPPESLADSLPAVMFTSTSSTFLTFKPQQPLHFTCLTIGTRGDVQPYIALAKGLMADGHKVRIATHGEFKEWIESHGIEFGYVGGDPSELMRICVENGMFTVSFLREGVQKFRGWIDDLLKTSWEACQGTDVLIESPSAMGGIHIAEAMRIPYYRAFTMTWTRTRAYPHAFAVPEHKMGGGYNYMSYVMFDQVFWRATAGQINRWRRNTLKLQSTNLDKMEPHKVPFLYNFSPTVVPPPLDWPEWIRVTGYWFLDDADVTAKKWEPPQDLIEFIDKAHSSGKKIVYVGFGSIVVSDPDAMTRCVVEAIEKSGVHAILSKGWSDRLQVKKGVDISQPEIPLPPSIYPLKSVPHDWLFKRIEAACHHGGAGTTGASLRAGIPTIIKPFFGDQYFWGDRVEALGIGSCVRKLTVDGLADAFIAATTDEKQIEKARHIGEQIRSENGVATAIESIYRDLEYARTLIKAARAASGSDDDDNVLVENPQALASSQSTPDRSSRGSWHEASQAASDWSIVSDSEDKKPSRKNSTKERDSSPSKRNSLAAAVLSVLPDALAPSSLKK

SEQ ID NO: 7582 - protein, 1269 aa, Lachancea meyersii
MAKKKQSGPESAVRAAQEGRARGGTGSQLRWMRSLSPVGKLYRSSASLIHFPGKVIYSGNVIPMAGDSEENMSLDSGGKDTEPDLARPCGMAKSIVGLLTTASVYAGMGDMEQAEEIFEDEEDGEDEEDGEDEEDGEDEEDGEDNEEDKAEVTNAAHEEQNEPEFVPPEHADESSDSLQTVSDLNSLADTITHVSKKDTLFEISVVPNHDATSIQSTSSGSRQLKIYRKLLSRFNLNEADDEFVLKQSCWLLKDLLIQGHIVLTSRHLLFFAFLPKCTGTAKMSGTLSTYSGGLRGRWTRYWAVLKDHTLSLYNSRKDLYFPLLTIDLRYASRIELDKRGNESTSFFKIHTETKNYRFSADSHFASRSWSSALKKQLFTTRNSENDSMSVKIPLANIIDVDEQMLVAQSVTLRIRVLESPTSFAVDDYFFMFLGKNEMNLKQIINEQLSKMDKPLIKTANTSHGPAPNLDSQAMEVNSPEKAVRGRSDSNSRKIIRRVLSPVSRVRRPSFSVHVPFNPKSPQRALRLLKTRDDSVGNIRISNGDTEGEINRDSLEETAELLSSSGVPITPVATSDSEESAELSDDARAGTSKFASWTPQPIKNMGSMWGAHPVHYRNEDADVFPDDDQYLASAKEQAVASKRFRSHFSLKQNENLRAAYYTHLNKNIPVYGKLYIGSSVICFRSLIPGTKTKMILPIEDVENCFKERGFRFGYFGLVLVIHGHEELFFEFSLQSSRDDAEFVTLKQLDSIKLDAGSSLSMADGLSQKLRNADISSEQQSTEAGKLRLFEDKINAEGYDLPMMVEESPYYKTSITPKKSYKFGLLTIGSRGDVQPYIALGKGLLKEGHRVTIITHLEFADWVRSHGIKFREIAGNPAELMSLMVQHGSMNVGLLREASSRFRDWITELFETSWHACQNLDILIESPSAMAGIHIAEALQIPYFRAFTMPWTRTRAYPHAFIVPDQKRGGNYNFFTHVLFENIFWKGIGGQVNKWRIETLGLKKTNLMMMQQNKVPFLYNISPAIFPPSVDFSEWIKVTGYWFLDGKDDYNPPPALTEFIARAKANGKKLVYIGFGSIVINNPKKMTKAIVEAVLDAHVFCILNKGWSNRLEEETETDPVEEEFPDCIYNSGSVPHDWLFPHIDAAVHHGGSGTTGATLRAGLPTVVKPFFGDQFFYASRVEDIGAGINLKKLNSKTLSRALKEVTTNSRILQKAQQIKAEISKEDGVRTAISCIYSELEYAKSLVAAKSQDKRKNIKDVGSPEENSWFLV

SEQ ID NO: 7583 - protein, 1515 aa, Sodiomyces alkalinus
MDLPDRLKGGDNSDEEEDLVPAQGPNMFTHMNQSIFGLIAAAGSRVNFHDRFEGQSSDEEDDADDDPSRLTATPRHHSDRSDPLGRRDSRHRSRPDDTQPSASKSAILDALKPHRRSSISRSKQKLARTLAALPRLSEKIGGLSRRSSQRESPSDDMNESFHSDAQISSSSATSNRGDLAPRLAPVMSRMLEARADATLRPSFDRDRRPTDDELTSAFDMGAEPGPSPLAVRLAQIFEFSEPEEVIEEYPCWLLQTVLLQGYMYITARHVCFYAYLPKKANEVVKSGYLSKSGKRNPTYNRYWFRLKGDVLAYYRESSNLYFPSGQVDLRYGISASITDKDKEGLHFTVTTSYRTYYFRADSAPSAKEWVQSLQRVIFRSHNDGDSVKISMPIDNIIDIEDTQMLQFADTCKIRVIDNDETFAIDEYFFSFFSFGKEAISVLRILFEDASARQKKDGTKIEALDDGTPGATASGQPSGQPSDQSAGRPSLSMTKRRSVGPGQIRTARLPEPVKATLSPMASASPNATSPRPSQDARRGSFDALRGSLDLLKGLGRRGSADMSSVTRDRSPRTFSGSRSVSRHRFEDMSASASAPMPSSPIPDKNESSDSFARSSMEDPSYSALGVSSVEDPSASQILQRSDVFQSPTIGRHDSASRQDRQRPPLAAQHRSASTPAPPPALATHAGQHAEASGAPTLQTITQIGTFPLQRVGAFAEYLNRSSRRMSSLIAAESMGYVEKVSGMWKGGRKHYDAPTEMREEDEDLYEDGEGNVQQSTERFRAHFALPETEKLQATYFGFLFRVLPLYGKLYLSDRSLCYRSLLPGTRTKLILPLKDVENVHKEKGFRFGYSGLCVVIRGHEEIFFEFSQQDARDDCFGALLKSIERFRFLDSSGTISREDTQDAEFALAERQALKEARQEEFPDHEIELPRQTTSDCRDAPTILYDDPNDSLLRYKPPRPLRITCLTIGSRGDVQPYIALAKGLMAEGHHVRIATHAEFRGWVEGHGIEFAEVDGDPAELMRLCIENGVFTWSFLREANSMFRGWLDSLLESAWRACQGSDLLIESPSVMAGIHIAEALGIPYVRAFTMPWTRTRAYPHAFVMGEYRMGGAYNYMTYVMFDNIFWKATAGQINRWRNETLKLRSTSLEKMQPNKVPFLYNFSPSVVAPPLDYSDWIRVTGYWFLDEGADYKPPQDLADFIAKARADGKKLVYVGFGSIIVNDVAKMTQEVIDAVLKADVRCVLSKGWSDRLAKNERQPQPQPQDGHDNGDRSTDEDEKDPKSGGAAAARREEPVIPPEIFVIKSAPHDWLFRQMDAAAHHGGSGTTGASLRAGIPTIVRPFFGDQFFFGSRVEDLGVGIFLKKWGAMTFGRALWEATHNERMIVKARVLGEQIRKENGVETAIQFIYRDLEYAHSIIQRKAGKNKTEGEKKEAGDGEGGLGGGSGGDLSEAEEEESWTFIGADEPDPEMVTKRLSEMPSTAGGGGVPGIGALALGGRPKTLGRRVLSGSRGGGCAGA

SEQ ID NO: 7584 - protein, 1457 aa, Exophiala sideris
MASHDTPSKRSGSRKLQKPNPRLSRLPSSHMPARLSLGADAQDDVTAPSRGRNAPAQYMNQSIFSMIAAAGSRTDFNARFDESSDSEEEIAEEKSTELKGIAAPVGPRLPDADAGQSVAIHDRDTVVDKKSKRLSGHRLVQSLPRLSARAFKSKGKEPAAPTSPSPESDESSESTSNPRDAPVLSRLITAEAEFKENEEALALTTSPEAQAPRARGDSTPQTLLATRLMEIFGFEQPEKVVAEYPCWLLQSVLLQGYLYITKQHICFYAYLPKKSHTVGKTGYLSKKGRTTSKFKRYWFSLNGDVLSYYSDPANLYFPSGNIDLRYGISAAFLTDKHKSKECKDFSLTIDHRTYHLRADTGSSAREWVQALQKTIFRSHNDGDSVKISLPVENIIDFEESPVVEFAETVKIRVIESEDSYAIDEYFFTFFSFGQDALQVLGSLLAEASGRRTSEDLLSPARKDATLRSPRTRPAISRQSSDFAPGSPRAQSSPPLKDSVRATLLPFSPEEGGKLSPRMSGDFHRGNSPSRLSVESPHFYGRASFDRGRRSGSTSRLEVNTSRRQSPLTRPMESEDFYFQSTDKETDSSNAPLSPRAEAQMSASQILTRSDVFHPPAVQRMETLASMSPEPTRKSSEVPTIPSTSPPKEVTSPIPIREAAETFGRSPREGRTGVHAEGMLRTGTSPTLQDLVKAGSYPLQRAGAFADFLKSRSVSMKKLLATESMSYLEKVSGMWAGDRKHYGENEGVVPDDKGIDPEDEEANVGHGDRFRAHFALPPSERLQATYFGFLHRVLPLYGKIYVSNRKFCFRSLLPGTRTKLVLPLKDIENVDKEKGFRFGYHGLVLVIRGHEELFFEFSSSEHRDDCTVTLLHSLETVRYMTESGILAKQDQDEAETAKEEHRLLQEARRDSSGDHQLVLPDTAEAVYSHQEHASVLFDDPRASIINFKPLASLRITCLTIGSRGDVQPYIALCKGLLAEGHKPRIATHAEFGPWVEKHGIEFRPVEGDPAELMRICVENGMFTYSFLREASAKFRSWIDELLTSAWQACQDSDLLIESPSAMAGIHIAEALKIPYFRAFTMPWTRTRAYPHAFAVPEHKIGGAYNYYSYVMFDNVFWKAISGQVNRWRKKELGLRSTNLDKMQPNKVPFLYNFSPHVVVPPLDYSDWVRVTGYWFLNEAQDWTPPPELTTFIQNARDDGKKLVYIGFGSIVVSDPAALTKTVVDSVVKAGVRCILSKGWSDRLGDPAALKTEVPLPADILQIKSAPHDWLFTQIDAAVHHGGAGTTGASLRAGVPTVIKPFFGDQFFFGSRVEDLGVGICLKKVNVSLFSRALWEATHSERMIVKARLLGEHIRQENGVQTAIQAIYRDFEYAKSLVKARAAIESVPANATAPVDEGDIEESWTFIGDESDPDLRKQIQEWDLPVRGRGPRVSIDRAGLRSMQGVEPVRKSSSVKRRY

SEQ ID NO: 7585 - protein, 1489 aa, Dactylellina haptotyla
MSSEVEDRPTRSNRVDLPQRARPRSHSPALPDRFKIASDEDLKDVSFSARGTNFSMHQSVFQMIQAASSKVDFHARFDSDIDEAEDEDEDSDEEAKRKRAMKNFVKDGLQSAPKESTQASTTDPEKIDLSASRQLSESRFHPKNIIKSIQQKRHDKKTRHAPSSGVSTSDDISSSTELTSSQGSMVSSTSQSNPTDIPSLEQSTIAAADSAIHAAQESDDVLFPEFSISSTALAEKVQKIFHLAELEEVQSEYPCWLLKTVLLQGYLYITDRHICFFAYMPKKQDSILKSGHFYKRGRKNPRYGRYWFTLKGDVLSYYSDASELYFPSGNIDLRYAIHAYADEGSKDHTFTLVTNSRKYEFKADSATSAIEWTKALEKVIFRIHNDGDSVKVVIPIENVLEIEKSPVIEFADTFKLKVVADDETYAIDEYYFSFFTFGAEAFELIRLLVEDTTAQKIPKDLLTQGTAGTAPTSKRMSLGCSPAREMSPASPTRLSLRNSLVIGMPAWPAATGPTRSGDGPVTPLLKEAVRDTLLPVPASPVVGSPRTSGEYSRRSVDVANRRSTDVSRKSLDASRKSMDGEYRSSSLASVLRRKTKSQKQSPSVSAAGSPSREMTSSSFVKSLQSEPSSLTESSDVMPISSESEGELAASQFLSRSDVFQQSIAFADPAGIDRGRSPTLKGKAGTIAPVGAPPLHIHPPSRTGTDLSVPTTIESVKKTESSPGELERPSLEGRTSSDKKYGIPGPSLGDVYRVGSYPIRSAQGIADWMKRRSKHVATGSIGYFGKVTDMWTGGRKHYDDKGSTPTDTATGDADADDEDEGAATPSERFRQRFALSESENLVAVYFGYLSRVLPLYGKIYLGDQHFCFRSMVPGTKTRMILPLRDIENVDKERGFRFSYHGLVVTIRGHEELFFEFAGLENRDDCGSTLSKVIDNVRHMRESQLITPEQKINAEIAKREHELLQEARLEAGHLEHEMKLPQTTKEVASGHAMDVPPIVFDDPHTSIVHFKPQESLRFTCLTIGSRGDVQPYIALCKGLIKDGHKARIATHIEFKGWVESHGIEFREVAGDPAELMRVCVENGMFTLSFLKEASSKFRSWIDELLDSAWIACQDSDVLIESPSAMAGIHIAESMRIPYFRAFTMPWTRTRAYPHAFAVPDHKMGGAYNYFSYIMFDNVFWKAIAGQVNRWRKKDLNLKSTSLDKMQPNKVPFLYNFSPSVVIPPLDFSDWIRVTGYWFLDESQQNFEPPPEMLDFMRKAREDGKPIVYIGFGSIVVSDPQALTQTVVDSVIKADVRCLLSKGWSDRLGKKDASAPEIPLPDCILPIKATPHDWLFKHIDAAVHHGGAGTTGASLRAGLPTVINPFFGDQFFFGGRVEDLGVGVCLKKLNVKTLSEAMWLATNSTRMITKARVLGEQIRSENGVDTAIQAIYRDMEYAKSLIKNPQLETSDSAEESWTFVSREESDAEIARRNSMKDTASEGSNKTTGASTP

SEQ ID NO: 7586 - protein, 667 aa, Tilletiaria anomala
MTAQSSLYRVLPTKGLLFISDRHICFRSSGLATRTMGRTLMMLPIGDVITVARHRAFQPGQHGLIVVVRGHEEVFLEFSSVDLRNECCERLEQMLEEALMRPTADISIGKQDDLILKDLSDKLEATSISTSLPSSSSSDADTQDWESGSVSASMFKSQSSDFLSFLPKQPLHITMLSIGSRGDVQPYIALAKALMADGHRVRIATHDEFSAWIEGHNIEFSAVGGDPAELMRICEQNGTFTVGFVREGLLKFRGWLDDLLLSSWRACHGTDVIIESPSAIAGIHVAEAMQIPYFRAFTMPWTRTRAYPHAFAVPHSKAGGSYNYISYVIFDQVFWRAASRQINRWRQETLRLKSTTYDLLEQHKVPFLYNFSPNLVPKPLDWYEWIHVTGFWFLDNPGETSGRSWAAPDDLVAFINTTKAQKRKLVYIGWGSIVVSNAAAMDECVGEAVRKSGVCAIVSRGWSDRLSENKGTPSEAFSSPDIFRVDSVPHDWLFPQLDAACHHGGAGTLGASLRAGLPTIIKPYFGDQFFWGQQVESLGVGTCVKECTAENLAAALRKATQDVRQIERARQLGERIRSENGVQAAVTAFYRELEYARSLIKTDSRLHTTNSEVQASNTVDGASPSQPHAEELHERSSRAIDAINTPSNRPRSTRSSSADSNWSILSP

SEQ ID NO: 7587 - protein, 1443 aa, Fusarium graminearum
MATQADDAAASQANIEDGDLKEHVHDELDKIQQQRSTATVFPEPLRESDSEDSDDEDNGPAQAPPMFMNMNQSIYGLIAQASNRVDFNDRFDGMSSDEEGESSQNTRTESIARTSILQPAGKGKDKVHRRRKLSEHKLLRSLPALPKLRSRHKSQHSTLPAPEEVADEADDEHGDGGLLPAPALTLTRQDTQDRLAPVMSRMLEAKADLSIRPSFDLDRLSSDVSRSSDSDEVSALSRKLKEIFEFDEYEQVIEEYPCWLLQSVLLQGYMYITSKHICFYAYLPKKTHEAVKSGYLSKSGKRNPSYARFWFRLKGDVLTYYKTATDVYFPHGQIDLRYGISASIVDTDKEALHFVVETRHRTYKFKADSAPSAKEWVKSLQRVIFRSHNDGDSVKISLPIKNVMDIEDTQMISFADTCKIRVIDNDETYAIDEYFFSFFSFGKEAINVLKILIEDSSGARSAEQVITGDDHDSSQPSSGHASKAASKRAPSKLSTGKLPDTVKATLAPMSPLSPRSPSQLSPRASMDAPRSSFDGFRRFGKKSLDVTSSIGDHSPRRSFSGRRSTSHQHRQGTTTPKQAHDSEDSFLQSSIENPSISTLSPSSYDEPSASQILQGSDVFHSPMMRRSASTSRKRDRSGKRTPRSSSAHGDRHHGIPHAATTGAIHKMGDEQADSQRPATPTLNSITKIGAYPLQRANAFAEYLSRTSQRMGSMFATESLGYVEKVHGMWKGEHRHYDEPQELRTDDDGEDIDSEADDKMQTTIDRFRAHFALPESEKLVATYFGAIFKVLPLYGKFYISDRSFCFRSLYPGTRTKLILPLKDIENVHKEKGFRYGYYGLTVVIRGHEELFFEFRKPGLRDDCAVTLHQLMETNRFLEQSGILDQEEQDDEEAAAAMAERDELQEARQDEFVDHELTLPRTTSGVSNAPTILFDNPNSSGLAFKPQKSMKITCLTIGSRGDIQPYIALCKGLLAEGHKPRIATHGEFQEWVESHGIEFARVEGDPGELMRLCIENGTFTWAFLREANSTFRGWLDDLLDSAYTACEGSELLIESPSAMAGIHIAEKLEIPYFRAFTMPWTRTRAYPHAFIMPEHKMGGAFNYMTYVMFDNIFWKATAYQVNRWRNKTLGLPSTSLEKMQPNKVPFLYNFSPSVVAPPLDFSDWIRVTGYWFLNEGGGDWKPPQELQDFIAKARADGKKIVYVGFGSIIVKDPAKMTQEVIDAVLKADVRCILSKGWSDRISPKDDPSKPPPDEPVIPAEIHVITSAPHDWLFSQIDAAAHHGGSGTTGASLRAGIPTIIRPFFGDQFFFSTRVEDLGVGVCVRKWGTNSFGRALWEVTRNERMIVKARVLGEQIRSESGVDNAIQCIYRDLEYAKSLIKRRAGKNNAEHGLAEDDDDTEESWTFVGRDEPDPDAVTKKLSDGLAGLGAAGDRPPPLGSQAPTVA

SEQ ID NO: 7588 - protein, 1487 aa, Arthrobotrys oligospora
MSSEVEDRPTRLDRVDLPRRARPRSHSPALPERFKIATEDDLKDVTLSARGGNFSMHQSVFQMIQAAGSKADFHRFDSDIDEEAEEEDSGDEETKQRKMAKNFVVKEGLESANKERTQAVTDPEKHDTAASKRLSESKFLPRNIIKSIQQKRHDKKSKHTSSSATSTTPSASEDISSSTELPSSEGSSILPSVSRSPAGEVPSLAQSTVTATNSAMEATQEVGGEDVLFPEFSISPTALSEKVKVIFNLPELEEVKSEYPCWLLKTVLLQGYIYLTDRHICFFAYMPKHQDAVLKSGHFYKRGRKNPRYGRYWFTLKGDVLSYYADASDLYFPSGNIDLRYAIHAYVDEGSKDHSFALVTNSRKYEFKADSATSAAEWTKALEKVIFRIHNDGDSVKVVIPIENVLEIEKSPVIEFAETFKLKVVADDESYAIDEYFFSFFSFGAEAFELIRLLVEDTTAQKIPEHLLTRGNSKRASLGCSPVREMAPSSPTGQSIRHSLVMGMPAWPAATVHLKSLDGPVAPLLREAVRDTLLPVPTSPVVGSPRTSGEYARRSFDVTNRRSIDFSRKSMDNNEARSSSIASVFRRKTKGRKASPPRSAAASPSREMSSSSFVKSMQSEPSSLAESSDAIPMSSESEGELAASQFLSRSDVFQQSYPAGTDPSGINRGRSPTLKDNAGTIDPLPAPPLNIHPPSRAATDLGVPVNVPEGSVKKIESSPGELGRPSLEERTSSDKRFSLSSPSLGDVYRVGSYPIRSAQGIADWMKRRSKGVASGGMGYFGKVSDMWTGGRKHYDDQGPIPNADAAGDVDADDEDEGAATPSERFRQRFALPESENLIAVYFGYLSRVLPLYGKIYLGDQHFCFRSIVPGTRTRMILPLRDIENVDKEKGFRFSYHGLVVTIRGHEELFFEFAGLENRDDCGSTLAKAIDNSRQMRESQLITAEQKANAEIAKKEHDMLQEARLEAGHLEHEMKLPHTTNEVAQGHGMDVPPIVFDDPHTSIIHFKPSEPLRFTCLTIGSRGDVQPYIALCKGLMKEGHKARIATHAEFKDWVESHGIEFREVAGDPAELMRICVENGMFTISFLKEAAGKFRTWIDDLLSSAWAACQDSDVLIESPSAMAGIHVAEAMKIPYFRAFTMPWTRTRAYPHAFAVPDHKMGGAYNYFSYIMFDNVFWKAIASQVNRWRKKELHLKSTSLDKMQPNKVPFLYNFSPHVVIPPLDFSDWIRVTGYWFLDESQSNFEPSPEMIEFMRKAREDGKPIVYIGFGSIVVADPQALTQTVVDAVVKAEVRCLLSKGWSDRLGRKDASTPEIPLPDCILPIKATPHDWLFKHIDAAVHHGGAGTTGASLRAGLPTVISPFFGDQFFFGGRVEDLGVGVCLKKLNVKTLAEAMWLATNSNRMITKARVLGEQIRSEDGVQTAIQAIYRDMEYAKSLIKNPQQEASDSAEESWTFVNRDEDDADIARRNSIKDTNSDDSSSKITGASTP

SEQ ID NO: 7589 - protein, 1217 aa, Coprinopsis cinerea
MPSVTDDSPFITPPSPPLRPSSTPFRGDGSMRAGTQTLIQALQALPWMMNEVDEDSAVNDVSQSEPESSDDDRPGFKRLSSSIHAIYRPLARSRRMSIPIPRRRKDRNTSQPLEEETSSALSSESEDDAEADFEEQPPQPPHSRPTPLQHQSLPPLTITDKSVAQFRPLYDRTAEKLREIFELEGIQEKCHAGYYDLSGYMYLTNDYLCFFAHMPVREDQVLKSGSLSKKAQRTKRWIKHWFILKNDALSWYQSSSDPYFPHGILDLRYAISCEAIGEREFRIRTTQKSVTLSADSVPSRDEWVKSVKKVIFKAQNSGDNVKIAIPYSVVLDVELSTAMDFSETIEVKVVDKDDQYSLDSYFFAYFHDMPAALEQIRDAIRTHRAIPEHSQEKTVLDTTVTRSPPPSALERPSTIASDSVVPKSTSGFRLSSILKPFSDTISLTRASTASESESQCSNEEFTYISQRGPSSFVPVTTSPKSITPQEQLASQPGPSSQSLPNPDHTYPPSTFSSSIHPDMSSLTRESTSLWNVGVPSWLKPTRRVFGSFASSESTPTSYGSMAVKEVYSSPAPSAQGSSLSRMTGGDLAYSVLEAPAASIDQDVVDKFRTAFAYDEKETLLGYFPGYIFRLLPVFGRLYVSTNFFCFKSSGPLAVRTRMTLPIRDIVATEKTKATRFGHHGLIIIVKGHEELFFEFGAADKRDAFVRLLEKQMDDVRARLAVGETLEPSSEKREALALEAFDSKTSASSDSDPAPPPDNMSDSLPAVMFTSASSTFLTFKPPKPLHFTFLTIGSRGDVQPYIALAKGLIADGHKVRIATHGEFQEWIESYGIEYGCVGGDPAELMRICVENGMFTVSFLKETLQKFRGWLDDLLQTSWEACQGTDILIESPSAMGGYHIAEALGIPYFRAFTMTWSRTRAYPHAFAVPERKMGGSYNYMSYVMFDQVFWRATAGQINRWRRHTLGLGATSLDRMEPHKIPFLYNFSPTVVPPPLDWPEWIRITGYWFLDDADVGSKKWTPPDSLVEFIDNAHQSGKKVVYIGFGSIVVSDPRSMTKCVIDAVVQSGVHAILSKGWSDRLHVKLADASEPEEPLPPQIYPITSAPHDWLFARIDAACHHGGAGTTGASLRAGVPTIIHPFFGDQFFWADRVEALGVGTGVRKLTVSALKDALVSATTDQKQIDRAKLVGEQIRRVHFLLDPGPFSSLTLEHRRTAWLLP

SEQ ID NO: 7590 - protein, 611 aa, Aspergillus niger
MPHQDGPTADDWPDEHLTEQTTNSTGHGRTPRRAHYHERGLNTGVRVMDDGRLDIKIRERKPWVSKIIKHLQQQPEPLHEERKPSVCFIEDGKPPCALKLNIVIQVVGSRGDVQPFIALGKVLKSHGHRVRLATHLAFRESIEHEGLEFFNIGGDPAELMAFMVRNPGLMPHMSTLRSGAIPRRRREMKAIFSGCWRSCYETGDGTGLHHIPEDPWSETADYRTMPFVANAIIANPPSFVHLSCAEKLGIPLNMMFTMPWSATQSFPHPLATIRTKNTKPSAANFASYAIVEILMWEGLGDLINSFRKRELGLDPLDAIRAPSIAHRLRIPYTYLWSPALLPKPGDWGDNIDIAGFSFLSSGSDYTPPDDLANFIKSGPPPIYVGFGSIVVDNPGSLTKIVFQAIRESGQRAIVSKGWGNLGADEDDIPENIFMISKSPHDWLFQHVSCVIHHGGAGTTAAGLVLGRPTIIIPFFGDQPFWGSIVARAGAGPLPIPHKQLTVEKLTNAIKQALEPETLEKAKEIGKEMRKERGVQNAAASFYQHLDVQTMRCSICPDRPAVWWVKHSHIKLSTFAAAVLVETGLISPRNVVLYVLCSLYLADGVYMANWWF

SEQ ID NO: 7591 - protein, 1191 aa, Wallemia mellicola
MRMGTQSLIQVIQAFAHHADDDSNDDDEDAQEDTQDHRVFDMYSSLNTVHNKPQTHLHESMSTSMSGTPHESQDEDEEAGSDRSAHSDDSELTRMRSQSLKKKSTQRRRNLSKKLSEIFDLDSQEDIKAEYRCSLLGSSYRPLLEGFLYSTNSFLCFFAHVPTLERNNVVKTGPIGKRTLRTRRVIRYWLALKDDVLSWFGSAIDPYFPVGNVALRYAIRCVTVKNSDREFTIFTSERKFTFLADSKTGRNEWVKVIRKGMFRSQNESGSFKLVIPYDHVINVERSSNLEFADSISVSFINNEDGADYYYFDHFRDSQSACNTLSEILETHRHDVHRILSNENLVMSPTKMKDEFIDGSEVTARPSSSGHIGNHTYPPSNTKNSRSRSSSLTAEIPSWIKSGSIKLGKVVYSAPRMIPHPHLSTILPKLPSIPFLNNNNSNQGRQQPLPNPALTNQLMRTNSRVYEHYEEPTNSRSNDNNRSRSNSGVAESDDEFEEVGSDFSVLEHSAGMEDILKVEEEVQRKFNDYFALPGEKILGHFNCALFRVYPTPGKVYITNNYLCFRSFQIWSRTKMILPLNDLQAVQPHKPLRFSFHGLIMIIHRHEELFLEFTTSNRRDACEKLLNTQLDKIFRSASIQQTQSSKGLQEAQIIEDLSLSYRHPSLTAPVLGEEGVSPSTSVVSFKPKNPLRITCLTIGSRGDVQPYIALCKGLIKEGHHCRIATHLEYKDWIENYGIEHREVGGDPAELMQICVEHGTFTLSFLREGLFKFRSWLDDLLKCSWEACQGSDLLIESPSAMAGIHIAEALQIPYFRAFTMTWTRTRAYPHAFAVPESRMGGSYNWMTYTLFDQVFWRAISGQVNRWRRSTLGLTGTNLQRLAQHKVPFLYCISPTLVPKPLDWNEWIHVTGYWFLDSITPENSENSVNDNNGKWDAPAGLLEFIAQGRSLNKKIVYIGFGSIVVSDPDEMTKCVVEAISQADVYAVLSKGWSDRMHTGKKEEKLLFPPSIFSIDTIDHAKLFPMIDAAVHHGGSGTTGASLRAGLPTVIKPFFGDQFFNADRVEATGVGSSVRKLTVETLSKALKTATTDEKQIANAKTVGEKIRNENGVANAIECLYRYMDYASTVITTRAHENLQHDDGIDAQDIEDDDDWSLPSETFSEDEAQRSMGVLSLATNIGKRSLGVGKDLITKKL

SEQ ID NO: 7592 - protein, 1187 aa, Brettanomyces naardenensis
MTSRSQSYDSSDGDEYFTTDADKQSIDPSIHVPSIHIGSTQDSSSRLSRKDSAHQRSSVLSKLAFSPGRLLASPTRILQSLSPGRKKDPDVDTSIEASIDGISRSFAGFLTTASIYAGFQDIEEANEEPNEDEQPIPNPTALSSPTISSPPTAPSSKSRFEISFVERKPTLSDQRAAELSLRLRKTFQIPEDSEFIADYSCWLMGDVLLQGHLYITNECILFSAFLPKKGRGKIVQQGALSVKSTRFHRKWAILRESTLSIYSSSTELYFPDLVIDLRSALRAEIHHSGSEEGSVWLKVVTSKKTYWFLADSLSSARSWVSTIKRQIFQSRNHGDQAIVKIPLQSILDLELTTVLGETKNLRIKVIENPDSYAIDDYFVLFFSQGEKASEDIRRVIKDAGIELGDGETDEECSELMKSKAKLLKESEIAVETTNYLIGEEGAKVLWDSKEEVEEEEEEEAVAVPSRSSRYSPWGHVQAAASSLSSLALPFSSPTVSHFGPETVGDPFYVADSSIRKQKQESFLQFFSLPDELLVASYHAYILRGLPSYGRLYIGTHHLCFRSTLPGSGTLMILPFADIENAAKEQGFRFGYSGLVVVIHGHEELFFEFSNQNARDDCECQLLRQLDVLEAEVSPSSRSGSQTLSSPPDSVTLASARIRLVESKLNDSIGADVPIIMEDHPLQKTEVHPSRPYRFTLLTIGSRGDVQPYIALGKALMKEGHKVKIVTHAEFGPWIKSHGLEFDVIAGDPSELMALMVSHPTISYSFVRDARSKFSSWIDELLESSWKACQGTDVLIESPSSFAGIHIAEALQIPYFRAFTMPWSRTRAYPNAFLVPDQKLGGSYNYMTHVAVENGYWRGVSNQVNRWREQTLHISRTSLAAMRQSSIPFLYNISPVVFPPSVDFPEWVKVTGYWFLNEGGEEYKPDSKLVEFIRKAREDGKKLVYVGFGSIVVDKPKELSRAVANAVLEADVRLVLNKGWSERGSTEEATDEVTAEEEVEGGNPEHDDANTPEFPPEVFSSGSVPHDWLFPLVDAAVHHGGSGTTGASLKFGLPTVIKPFFGDQKFYASRVEDLGCGVVLKELNCHSLAVALKEVTTNKRIQEKAKLIGKKIRAENGVQNAINAIYSEMEYARSLSAGKYKAMKGEMERELAKEEEEEEEEEIIGDEREGEDEEEGEEGEGEGSWLLV

SEQ ID NO: 7593 - protein, 1190 aa, Aureobasidium subglaciale
MSSSTSQVALPDALKDIFEFDEAEKVVAKYPCWYLQSVLLQGYIYITQRHICFYAYLQKKTGVTTKSGYLTKRGQRNPRYKKYWFVLKGDVLSYYKDPLTPFSPRDVIDLRYGVSAEVTTTQGKDQESSSFCVVTDAKTYHFRAETASSAAEWVKQIQKVIFRARNNSDSVKICLPVDNVVDIEESSYPDFADTIKIRVIDNDETFAVDEYFFSFFGFGDEALRVLRSLTQETSAQRVLSSRPVSPVLTKSDRRPSSTHGRRSRLSSTSPAPGGIHENVMATLSPASGLATKSARSSSELEHSTLDLTQAKEERYVKHSAIQEGSRKQRNWGKATRDPSESYMSSSDQGNDSEMSESATGTDASGSHILSGSVMFHKPTIGKHDTDHAALHTASTSAQTNVSSASAKRPSNEPEAKPFVKSIPNSQVQDMHQSDSSTLGGLMKVGAVPIQRASGFLYNSGKRVSGLFGSSPLEYYDKFSGMIAGGRKHYAEADELVPGEEVQDSEDEMTVREAEKSFRSHFALPDSEKLVATFFGFFHRVLPLYGKLYVGSTRLCFRSFMPGNWTKLVVPFKDIMDVDKERGFRFGYSGMVVVIRGHEEIFFEFGSQDLRDDCTVTLLRSLNALEFSQESVLLTEDEKRDAEAAAAENLLLQEARQGDQGGVEFQPHRDIDQSEQDSPAIFFDDPAASVLDFKPQESLRITCLTIGSRGDVQPYIALCKGLLAEGHRPKIASHAEFGDWVRSHGIDFAPVEGNPAELMALCVDHGMFTPSFLYETNQKFWPFVRGLLKTAWAACQDCDLLIESPSAMAGIHIAEALDIPYFRAFTMPWTRTRAYPHAFGMQNNRMGGAYNYMTYIVFDNIFWKATSSTINKWRKEDLGLKPTNMEKMQQDKVPFFYNFSPSVVTPPLDFGEWIRVTGYWFLDEAEGFTPQKELLGFIKKARADKAKLVYIGFGSVVVPDPKQLTLDIIAAVKKADVRCILSKGWSDRMDKKDARALEVPLPDFMFQIASAPHDWLFRQVDAAVHHGGAGTTGASLRAGIPTIIKPFFGDQFFFGSKVQDLGVGQKVLKLTENALGKAIWIATHDSRMIEKARKLGEQIRSEDGVGNVIKAIYRDMEYAKTLVQQRVARAAQGDTDAEDEEEVEVEDSWTLVENDSDPEATSPTAMMQPQSPSLAAKGKGKLGLSYLPLRT

SEQ ID NO: 7594 - protein, 1334 aa, Kalmanozyma brasiliensis
MKPSKGRLQALTRDGTSDDVSTPQGSNSPLDGSVATIGPGPSRQKRISLTQSDIIPSSRDSTLSRGVKKPSNLRSQLHTATSASVASSASGIDNNDDAQDNGKHQSGTNPFDQDPTDAHSTSLQDQHNLSEAEQRTDHGSIQHLIRPYLDPRPPTEPEFDNVELDHDRLLRQLKDIFQLDAAETLLLAQPCWLFRSLLLQGHLYLTSSHVCFYAYLPSRDEKTIRTGMLGKRTRRTHRFSKHWASLKGGKLSWFGNDRDPYFPQGHIDLRKVSAIEPSDNHTDHFKVTTPARKFTFLTEDEASRDAWIASLQKETFRAQNQGESVRISIPLETIMNVETTLSVDSTEMVCITVVDEAGDFSIDEYYFLHLTKPSAFVSGLNALLDQAGKGSVSSLQAGEAGLSFSKLSIRDSTGAAHALTASRKSLEEVPTLPRVRVAQLAEAADPEAYQNKTSRIDATGAPDSSPRQSKAISGESAPTAAMAVPMGKRRESQDGSNDAILSSTPRAALLNRLSMESSHTYPPSPSVSDPPSMFGQVQKEADRGWAIPDWLKQAPAMVLGRASESSSTDTRAEATTSGTGTRRHRKVLEKWSDEKSADDVSRGESSNTDTEDDQLSQSIYSTQSAYSMLDTEEEAMEASSHTNIAAEFRDTFGIGEDEGLIGHTHAYLYRVLPVAGRFFVAEHHLAFRFSGIAAKTVGRTLMLVPLQDVISAAKHVAFRPGHHGMVINISGHEELFIEISSAHRRDELLSLIEYQLELGKGGRGSRASREAATRERSNALVLRDLSERINDGLATDSMTSSADSSSLSQTGSKMGSKSGNLSQIGEGSSILSFAPTTPLTFTMLTIGSRGDVQPYIALAKGLQADGHRVRIATHAEFGDWILGHGIEFSEIGGDPAELMRICVENGTFTVSFLREGVTRFRDWLDDLLASAWRACQGSDVIIECPSAIAGIHVAEALQVPYFRAFTMPWTRTRAYPHAFAVPNKKAGGNYNYMSYVIFDQMFWRASSFQINRWRKNLLGLKPTNFDKLEQHKVPFIYNFSPSLVPRPLDWFEWIHVTGFWFLDNPDNSSSKKWEPPADLVAFIRRARERKRKLVYIGWGSIVVPDAEAMTRCVLQAVQKSGVCAILSKGWSDRLSAKGSTAVDAAAAEDVFQVTSVPHDWLFPQIDAACHHGGAGTLGASLRAGLPTVVKPYFGDQFFWGQQIESLGVGSCVRQLTADGLAAALVMATTNTKQIERARKLGEQIRSEDGVANAVKAIYRDLDYARSRVKRDTRIEGVRSATQAKQGSAASTVGSGPTQQESEEDEEEDAGNISDEWSDIGGSGRLDPGASTFLS

SEQ ID NO: 7595 - protein, 932 aa, Rhizoctonia solani
MDKHDTPFYMREESGKNVVPDTFETDNSEDSNNITKIEIGSIKTSPAINYATYKALGKGLSSSANMTPDGRIVITLDLHKKLPDLPKDYANPVREYAVDRVDWRVAPPMSIVIMIVGSRGDVQPFVALGKSLKEHGHDVRIATHETFRSFVKGAGLRFFDIGGDPEQLMSYMVRNPGLMPGLESLTNGDIGMKRKMVAEYLDGCWKACYEPDDDDDQLSFAADAIISNPPAFAHIHCAEALGIPLQLSFTMPWSATADFPHPLVNVLQSNAETGLTNVLSYALAELMTWQGLGDVVNNFRTQTLGLKPLSMRSGAGLVDRIRVPWTYCMSPALVPKPDDWTNHIDVVGFYFLDLASNYEPPDNVKRFLDEGEPPIYIGYATLVHFRLGAPKDSSYFSFGSIVIEEPKEMTQKIFQAIRETRTRAILSAGWGGLFAPDSPNVPEGVLILDKQTGNIPHDWLFSHVSAVCHHGGAGTTSAGLKAGKPTIVIPFFGDQPFWGAMIAKAGAGPEPIPQDELSTKKLTAAFEFVKSSRARQAAERMGKQIRSENGIALGVDSFHKHLPLLNMRCDIEPHKLAEWWSPEHYLRLSGFAATALTEAGLLDNKKIQHHRTKEYEPHKKATDPITGGSIEIMRTVTHYYAGIAQIFYSPVKGIINTTTAIPRGVMNIIGSVSDGFHNVPRIYGSEVRERGPVNDFSSGITEGAKAGQQSTDGITGLVTEPLAGAKKEGFIGFIKGSGRSYINATMKPAAGIMGMISNPIEGAWKSVQKPWAKKQDSRQLEIRRERGKRAYEASTEEERREVIDAFKRLTNRNATLERKKMMEAEVKEMLQTDASQKLTLSDDRGGSDEERGLSDDPKSVLSPVRSASSDHLARSKDEKVAPPPKLPKRPSQPNTEDEEAAFQRDLDLALRLSLAEQQGYERGLMNSAEAKH

SEQ ID NO: 7596 - protein, 634 aa, Citrus unshiu
MENHGRRCSDASEDVSVDYDAEIESENCNGRGDSSGGQNAARDDASTSSDVRSCSSSERGKVVHNHSLGILSARLFDERVPFRKKMEKSQKHYSIGVGKAKRQILLPDRYAFGDSISLTMSVVYTISLGTIRSCYNDSQATNTTMLIVVQLKWLNRLATVKDDGTVQFEVPADIKPQNLDFGTGVVYTDDSTDQEPIEAADVHGIPRLHIVMLIVGTRGDVQPFVAIGKRLQEDGHRVRLATHANFKDFVLGAGLEFFPLDMVKNKGFLPSGPSEIPIQRNQLKEIIYSLLPACKDPDPDTMVPFKPDAIIANPPAYELLKVPLHIIFTMPWTPTSEFPHPLSRVKQPVAYRLSYQIVDALIWLGIRDMINDFRKKRLNLRRVTYLSGSYSSPLDVPYAYIWSPHLVPKPKDWGPKIDVVGFCFLDLASTYEPPDSLVKWLEYGEKPIYIGFGSLPVEEPEKMTEIIVKALEITGHRGIINKGWGVAESKDFVYLLDNCPHDWLFSRCLAVVHHGGAGTTAAGLKAACPTTIVPFFGDQPFWGERVHARGLGPAPIPVDEFSLDKLLDAIRFMLHPKVKEHAVELAKAMENEDGVTGAVKAFYKHFPGKKSESEPELPHSHRGLLSIRRCFGHT

SEQ ID NO: 7597 - protein, 1377 aa, Spizellomyces punctatus
MVMINVQDSRIDQGEKVTSQSNHFPLTVVGQEESRTSTSTTDIETVRIQQDSEKKKQSRLRKLLRIRPNSDIFPKTYPGPTSAPAVLDVLDLAVVNVPSVEDGTLSSSPPRTKYTDEKSKTGLWKKLQRRNTTPIKRIDRSSEQTEQWTSILIKDDQHQQAKCLPDAPDQCPQFSTPSLPSKDNRVVRFVDSFSDTDEWVADAELDSESDPNSLGSGDDSGNSDGKQRTKKKTKRKTKPRGKSRRLAKKLSHQFADMFSWFGGRGPAGAGSSSEAEAVNNPVLHLVTAALKVENDPDLTPASGDHMGSDHLADDRSSIHSLFLEATDALAEPENTPDTDGDIFSQSSGESDGEDSSPVLTPAGQSTANLTIAEKLQIAFELPETEPYRGEFACWLVRSVLLKGNIYMTDSHICFYASLPREYGSIQHSGFLRKRAKAPRKGSATFWFVLKDDTLSFYRNSTNLYYPLGRVNLKNVVDVQKSKQHQRGFSIVTRDKKYRFKADTETAREEWMKALKASMVRARNEGDDVRIVLPFANITELELSGSSSVTDSLRIKVVDDESALAEEYFFAYFNNLPYAYSTLIDLWQPQRSSPTRPSNPRRKSMYDTTATSALPLKPADVSSRSGLPTPTGSMALLPPAAETPSNSHHRRTQSEHPQSGSPTSESDSPRQRISEDGDATDSSSHPSRSSMSSTSASEFGQSGGEGPSRPASGWRRKLGHRKTRSDAGVLRDMSVVSGIGGSQPSQPTQKQQQHKEIKADEFRKTFALPDSEQLIASYHCSLHRTVPRLGKLYISSNHLCFKSKRVGIRTRLLVPLIDIVDVLEAPGFGWRLRITTRAGDVFLCEFHSPDVRSRCLEVLGRCLREMDCADTKGVERALSPLRHQASILDDIERSDSHVRPSELYNPPVPAALHITLLTIGTRGDVQPYIALGLRLQTDGHTVRIATHSEYKDWIEGFGIEFREVKGNPAELMRLCVENGMFTVGFLREAVSKFRGWVDELLLSAYEACKDTNLLIESPTAMAGLHIAEHLQIPYFAAFPMPWTRTRYYPHPFAVPDRKRKGLGGLGGSYNWMTHVMIEGLLWRGVSGQVNRFRRKTLGRPPIQLGTLNDHKIPFLYSFSPTVVPPPPDWQDWIHTTGYWFLDDSDPDWTPPEDLRQFLEESKGMPVVYIGFGSIVVSDPDEMTRTIISAVLKSNVRAILSKGWSGRLATSTPSEPITYPPQIYPLTKPAPHSFLFPLCTAAIHHGGAGTTAATLRAGIPMSIHPFFGDQFFWADRISDLGVGVTLRKLSVNKLSSALETLVTDTKMQQRARVVGERLQKEDGVGEAIRCIYRDLDFAQERIKHVKTWVDERWGGSTLWSGDKKDKERDIAERRAAESG

SEQ ID NO: 7598 - protein, 2778 aa, Pseudogymnoascus sp.
MPAPSGDGNNLHKYFSSQTPVATMVKKESEESAVPAAKMETPKDSKMSAFERKRLENIAANQAIMKDLSTTAKKIIPKTAAPKPPRSKTPRKREPPVKKEAARPTRTSSRIAGLEADGEGAKRKFEEEFQFAQEEAKAKKMRVAGDLNLSDIAVEGKKWTNDDNLLTSIMRGAQPYERTFDESDIKTTTDQELKSLREKMSGLELYKTWEPNDIKITPERIYSMGFHPTHDKPLIFAGDKIGNLGIFDASQEGEVDDDGDQTAEPVITAFKLHSRTITSLLFPTNHTEMYSGSYDSSIRKLDLQKQVAVEVYAPPSMDDDEAISAIDMNSNDPNLIYFSRLDGAFGRHDMRTKKDTDIWYVSEKKVGGFSLHPLHPHLVATASLDRTLKIWDLRKSTGKGDERQPGLLGEHTSRLSVSHAAWSSSGHVATSSYDDTIKIHSFTKAKTWGVGHEIKEEDMEPTAVIRHNNQTGRWVTILKAQWQQRPDDGIAKFVIGNMNRFVDIYTSEGEQLAQLGGDGISAVPAAAEFHPTRNWVTGGTASDRRQPEGLIAIGTTPPTQIFTTTPASAVATRQNTRHIEVVIPLKRARIMIRSHDDIKKRVGRKLTKKRREDRRVTMEIPQRFEDGDDADEDCTAPKGQNGVINQSVFGMIAAAGSQVDFHSRFDGQESEDDEEDETTEPDDASKPSEDSSDPSTSKPATDERRSRHRLHRRNLSDNKLLRSLSQLGIKHRSKHAQLSTASSDPVTPEKIKYTEKDHAALSPFKGPPIMSQMLEAKAAAVQRASFDSRRSDYISGQSDGADVDEGSPSDLAIQLKEIFEFESPEMVIDEYPCWLMKSVLLQGYMYITEKHICFYAYLPKKSNEIVKSGYLSKRGLKNPKYNRYWFSLQGDVLSYYTDPSDKYFPAGNIDLRYGISASVVDKEKTFFEVITNHRRYQFHADSIPSAKEWVKALQKIIFRSHNDGDSVKISLPIENVIDVEDSPVIEFAETCKIRVIDNDETYAIDEYFFSFFSFGKQALNVLRTLVSDSAAKQIPEDMLVPAQGTSGNNSPKAGSSRPSLTIATKESKPFLNPSRPTTSGLEESVKATLTPLMSSPLHVHSPRASGEFSRTSFDVNHQRSSSQTRPTRRSMEVSRLNLDGNGRNGSPSGDRRSFSRNRAAEKRNSEKQDSSDSYVHSMEESSAAAQSASEDATGSASQILRGSEGFFQPTIHRSASASRRRDDSLLPPTPTLPPHAATIDALERPKLNQADSGSSPSLQTLAKAGAYPLQRAAGFANYLNRHSKRMSTLLATESMGYVEKVSGMWKGGKKHYDEPLGHGLEDDTDDESVGQTEAAQQRFRSHFALPPTEKLQAAYFAYLHRVLPLYGKVYISNRSFCFRSLLPGSRTKLILPLKDVENVDKEKGFRFGYSGLVVVVKGHEELFFEFRQPDARDDCCVTLLQNLETIRFLKETGLLTQEEEESAAWAVAEHKALQEARHESRQHVHEVELPTTAEGASTETAPIMFDDPRASILNFKPTESLRITCLTIGSRGDVQPYIALCKGFIAEGHRPKIATHIEFKDWIEGHGIEFAPVGGDPAELMRICVENGMFTYSFLKEASTNFRGWIDDLLSSSWLACQNSDVLIESPSAMAGIHIAEALGIPYFRAFTMPWTRTRAYPHAFAVPEHKMGGAYNYITYVMFENVFWKAIAGQINRWRKKELSLPRTSLEKMQPNKVPFLYNFSPSVVVPPLDYSDWIRVTGYWFLDEGTDYKPPKEISDFIAKARADGKKLVYIGFGSIVVSDSAALTKTVVNSVLKADVRCILSKGWSDRLDKLGATEPEILPEEILQIKSAPHDWLFMQVDAVTHHGGSGTTGASLRAGKPTIIKPFFGDQFFYGSRVEDLGVGIYLRKLNVSVFARALWEATHSERMIIKANLLGEQIRSENGVDTAIQCIYRDMEYANSLIKRKTGSHHEGLAEDIEESWTFIGDDNDPELMSRIHAWDPRVVMAHAKEGELAKEVELTDSPVPTSRSETPLPSEKEEGNKWLVTALSVGQDIISSHRTYLPHAFADSPKPTEETTMGKPLNLGKKLRYPITVNKLLKTPGDSFAKGDAIFEYSFKWKKEVGDAFGDKWEEELTTIVSFASTADGKLLRWAIRPGMVIEKDQSCAEIDETCSHAVQYAGLCALCGKDMNETSWATDTVDAQRAQINMVHDQTLLSVSQDEASRAEEQLQRRLLKNRKLSLVVDLDQTIIHACIEPTIGEWQRDPTSPNYEAVKDVKSFQLHDDGPRGLASSCWYYIKMRPGLEHFLTTIAEKYELHVYTMGTRAYAQEIAKIVDPGHKLFGDRIISRDENGSLTAKTLSRLFPVDTKMVVIIDDRADVWPRNRSNLIKVVPYDFFIGIGDINSSFLPKREETPKVIAPAPPPAAAAPVSDTQEPTESTTAESSAEGQAQVRRDELATKATSTDANESMSALDELVAMGGGDDPTKREIQAQEQAAFLEKQLKERPLLHMQQQLDKEDNAEGEEAANGTAEESEHTEDYHSHRHHLLKDDDNELAYLENHLLGLHRTFYEQYDKALMNAKGDRVAHLRPGATKKVHMKDEAADLQIVPDIGEVMPQIKANSLKGTSIVLSGLVPLGVDVLRSEIAIQSISFGAQIHTKISRKVTHLVVAANRTRTQKVRQATSYPHIKIVNQQWLVDSMSRWEKVDETPYLINIHREDKSTQQELFDGQNLDESSGDESEADGDSSHDDDADMPDDFEGGQSPIEGLKDVDWSAADAELEEFMASGSESDTESVAS

SEQ ID NO: 7599 - protein, 660 aa, Gossypium hirsutum
MGSNGIDSSRKDLQEENVSNNRSKGVLKDSEQTDEVDESATEYRSSDDQSFSSSYEKEENQKSSSEQKSSVIEVSGTKQSSVSSTPKRGLDHCTSAPLAAQRHQLIDDNEIAFSRSMTEKKNSRHDLKIDRFSEREKVIERLTRWKNLIVNLIKIQNDGTVEVDLPKNSPVASELLELSSIEGPSFDLDDTLFYETTKSIPRLNIAILVVGTRGDVQPFLAMAKRLQEFGHRVRLATHANFRNFVKLADIDFYPLGGDPRVLAGYMARNKGLIPSGPGEISIQRKQLKSIIESLLPACTEPDIETGMPFRAQAIIANPPAYGHSHVAEALGVPLHIFFTMPWTPTSEFPHPLARVPQSAGYWLSYIVVDLLIWWGIRGYINDFRKKKLKLAPIAYFSTYNGSISHLPTGYMWSSHLVPKPKDWGPLVDVVGYCFLNLGSKYRPREEFVRWIQKGPQPIYIGFGSMPLDDTKKTTDVILEALKDTGQRGIIDRGWGDLGQFTEATENVFLIEDCPHDWLFPQCSAVVHHGGAGTTATGLKAGCPTTIVPFFGDQFFWGDRVHQRGLGPAPIPISELSIEKLSNAITFMLQPEVKSLAMELAKLIENEDGVAAAVNAFHRHLPPELPLPTAALEENDHPNPLQWFFLQIGKLCCLPCRLWNS

SEQ ID NO: 7600 - protein, 1411 aa, Candida inconspicua
MVAPKFKKTSSSSSKHDSEVDNKNESSRTTNEVNESQLSQTLDLLKAGPQKVISPATHLLRKARVSVSRKNNERREPHTEVTSDLDDEETLSSPSESDSFNLANKGNPHFLNKSASSSTHIDSKSSLFKRGSSNSIPSPRKLTVTSQNALHRTLSPIRSGVSLVGSSVNIKPKSTPETDFSLDERAQHITRSFANYITAASVFAGFEGLENDEDENGTLILTKDGSGDSKLMAPDNVVKLKDSESTDDTANDSDEEASNSVDIGTNDNSGSDGNDDDDSIITNSTVTNTVDTLMAKHNKAEILRVKNELYSKHSLRNRSQFELSVVQRMIDHVTSPDQKDNVFKKATIVTKRLKEVFHIDEKDNLLGDYPCWLMGDVLLQGHLYITDKKILFFAYLPKRKKNAVVKSGGMSVKSYPSMRMHRKWLILREHTVSIYASSTDLYFPQLVIDLRTALRAETYGSSKDSDPTTPVWVSIVTETKTYWFQAENLDTAKSWVTALKKQIFSSRNKGDEVAIEIPLQNVIDLEISNVFVTTKSLKIKIIENPETFAIDDYYVMFFSQGKDAADCIKEAIENAGLEISLSTDSTNEDWKNSDLIKSKIELLKTTSSSVKSTNFNLTENDDSLDVRNILMSSDEDDSDDDHNGATSFIKKMGYSTGKKLTKNLIPHIRMNRRSSTSNHHDSVDSMLDTSKSRSYESEGDIPEDDSISNLPDDDISVGDQSEGEKYESDEESGKKWSAKYLAHGITNFTSSLLFSGPPQHYDDTLAISKEGQDPYFIADKKKRESAEKRFIKRFSLSDSERLLATYSLYLMKGLPVYGKLYIGSTHICFRSTLPRTNTIMILPLSDTENVSKESGFRFGYCGLVLVIKGHEELFFEFSNSTTRDDCEMQLLKQIEQCKVTDGKDSVPDNSNTEALNSAKLQMFENKLNSDTGMDIPIIVEDHPFEKTNIKPSKSYRFTLLTIGSRGDVQPYIALGKFLMKEGHTVKIVTHSEFKDWVESYGIGFDCVAGDPSALMALMVSNPNINYSFIKEAKAKFREWIDDLLISSWNACQDCDVLIESPSSISGIHIAEKLQIPYFRAFTMPWTRTRAYPHAFLVPDQKLGGAYNYMTHVAFENGYWRGTCNQVNKWRVETLKLPKTNLGAMHQNSVPLIYNISPVVFPPSIDFPDWVKVSGYWFLDEKNNYQPPQKLVEFIEKARRDGKKLVYIGFGSIVVEDPKELTKAVVDAVVEADVRCILNKGWSDRLNSKDKGHIEIDLPPQIYNSGNVPHDWLFTQIDAAVHHGGSGTTGASLRFGLPTVIKPFFGDQKFYGSRVEDMGVGIALKDLNSKSLSKALKEVTTNTRIIAKAKFVGEQIMKENGVQNAVDYIYTLMEYARKLSVSKNKHDLADSDEDDDDLSIDLPKMHGSWLLV

SEQ ID NO: 7601 - protein, 1712 aa, Rhodotorula toruloides
MAHPLIKPSGPDATASTPPRASSPGPSAAYTGYSMSPHKASGSSHASQPPGFDGAPMEDLSGWGKSAERFGGMAQAGLRQEDGTFLHSETNAGSSESQGAPGIRTPLSRQASTSSASSSSSLASSSSSASGFNTTAEVSDPEEDAGAGIGGAGYGRMAATSLDEHTARKTREDQEMNRWREGASQSYHGGMGQGYLRMIHALAQEDAQERRKERREQKKRRKAKKHHRHASHSADDDAGDEQKKEKKEGSNAGDESNADLSKFRSLPERAAANPSLARCDNESPKSTVSSAQRQLLSGSATSASSHLRHQRPNIRAGGRDGEDLSKSSIFAIHRPIAAERRRTMSSTHGTDDESGEPDLAEQDEEYKDEGVRLRRAGKEEGKRPEMGDRTETSATEKTVETMERRQKLAEKLMDVFGLEEPEEVVAEYACWLFRSILLQGFLYITAGHLCFYAYLSQKEGATIRSGSLSVRGSRTRRYRKHWFVLKDSVLSWFPSSTDPYFPDGHIDLHYCVAVEPSTKHSHHFKVSTSEKRYHFSADSEASRDEWVKAIKKVVFRCQNEGESVKIAIPLETIVDVEKSSSLEFAETIRVRVYDADEGYSIDEYWLSYFKNIDGALEKINSVLEAFRSHHPSSQGTKEPLPPSAAHVQEVEDTTRAAQADLGESDQYRQAESEHQPRRSEESVRDVDDDPKRSKSLGQRVSSVLSQTTRLGRSSPKSSRAPASAPSSGPPGTPTKAASTPPNLLSQSGAAPTPISASSTPASGSIATLRPSSQQQPQAGTTPPSDDIAVRGVATVTAAAATAPTPPPVGSPPKMEGDGTITSLAPALSQPPVSLAEEGRASSEDTLSPRQHTYPPEPSTGPPPADGSGNRRTSTLSKILSAPAGAASSFGQGSRKILEVVTLSSVPGRKKSSKKGAVADAAITEEPEDMVAEEEDKAKRVDDFRKLFGLSEKEDLLEEYPAYLFRGLPIYGRVYISNNFFCFRSSGIMPGKSKMILPINDIIGVSKHRSYRIGFSGLMVVIKGHEEVFFEMNSTERRDACLEKLDQQREVVKQMHREQSKQEDDSEEHRQLQDLLDLSASKATESVSELPHPRSEAVPGQPPIMFSSTTSDFVTFQPEKPLRFTCLTIGSRGDVQPYIALCKGLMAQGHHCKIASHAEYRKWVEGHGIDFSPVGGDPAELMQLMISHDFFTISFMKEAVGRFRGWLDDLLASAWDGCQNTDVLIESPSAIAGYHVAEALRIPYYRAFTMPWTRTRAYPHAFAVPEVHMGGGYNYMTYTMFDQVFWRATSGQVNRWRKETLKLRSTSLEAMQQHKIPFLYNFSPVVVPPPLDWRENIHVTGYWWLDNPDDSKSKKWEPPKELLDFLDDAEKAGKKVVFIGFGSIIIPDPLEMTRVIAEAVEKAEVYAIVAKGWSDRASKKEDSEEQKEEEEQAEKQHHDLLDKPFIFNVKSIPHDWLFPRIHAAVHHGGAGTTGASLRAGLPTIIKPFFGDQHFYADRVATLGIGTHIRNFNVDNLTEALKKAVGDEKQIERARLAGEEIRKEDGVATAVECIYRDLEYARSLIPAPAPVDKDGDVSDSSSTSSDDGDEPDSIDEKKPVSSEKAAVAASAPSTPVKPTHDTAVAKDSPPGTESRTTSSDEGWDVMSRGSATGSTWDDSISRASSATRAPRSGNAQEALERDQVEGEPSVEEEPQSGLTARMLGFLGKPIKPGK

SEQ ID NO: 7602 - protein, 875 aa, Colletotrichum higginsianum
MSKRDTVRMVEDDTVPQDYLPSYETAINEGLQQHRDSVRSDGRVDVNLDSRLATTLARFIPDFKDTAELAQAAAAQGPPPEYFEAAERFAEKKTFPVRLNIVIQVVGSRGDVQPFIALGNELQTYGHRVRLATHDVFDDFVRKSNLEFYPIGGDPSELMAYMVKNPGLIPSLKSLKGGDIQKKRKMVKEMLEGCWRSCVEPDPRTGAPFVADAIIANPPSFAHVHCAQALGVPLHLMFTMPWSSTRAFPHPLANLQFGDKGVVDQMTANFVSYSIVEWLTWQGLGDVINDWRKTIDLEEVPFSEGPVLAESQKIPFTYCWSPALVPKPIDWPAYIDVCGFFFREPPQYTPPAELANFLKNGPTPIYIGFGSIVIDHPEEMTKILIEAVRATGVRAIISKGWSNLGGIESDDVLFLGDCPHEWLFANVAAVFHHGGAGTTACGLLNGRPTTIVPFFGDQPFWGDMVAIAGAGPKPIPHKKLNAQNLADAIRFCLTPEAAAAASEVAAKMRTENGVATAAKSFHANLPLDILPCDIFPDQPAAWDFKRGKKHLRLSKRAAGVLLDHLKIDKKNMSLHETRTYFIENRRWDPVTGTASSLMGVGLGMAKGASDIVVKPIQVYHKRSKLKSAEMEDVDVARSSASSDAPTPPPRSPSLAPPRSDVLERPRSAGRGCGSTTGAAMKASASGLGTFFKSYGKFYLDVPLAVTEGLRAAPKLYGEKVEDHAPIKDWKSGAMVGGKNFVTGVGGGFTDLFYQPYKGGRDGGAAGAAMGVGKGVMNMVTKTASGTLGIVAYPVQGAYQSIRTAVKSKTRNGIAAARREEGEYLVRNAPVDVETVLRKFDDMCRASEAGQAKAQGNGFFDFGRKSKDRDTQGTPY

SEQ ID NO: 7603 - protein, 880 aa, Aspergillus niger
MASNRNAEVFELPGDLVMPPTTASNNHPGVFELPGEAVTIPPTPIAADRKSGINITSDGRIDIDYNTTLVRRFSKLYTSHYSPRPTTPPPEYSETALQAANDNGPSLESPPAYTEKTWKIKLNIVIQVVGSRGDVQPFIALGNELQRYGHRVRLATHNVFEAFVRSSGLEFYPIGGDPEELMAYMVKNPGLIPNMRNLQAGEIGRKRAMIREMLDGCWKSCIEPDMATQLPFVADAIIANPPSFAHIHCAQALSIPVHLMFTMPWTNTKAFPHPLANLTGGGDEDQGFRNFVSYSVVNWLTWQGMGDVINHWRKELGLDEIAMFEGPRLAEILKIPFTYCWSPALVPKPTDWPSYIDVCGFFFRESPRYDPPADLLAFIAAGPPPIYVGFGSIVLEDAESTTTIILNAIRAAGVRAIISKGWSNLGGIHDDSNIYFIGDCPHEWLFDRVAAVVHHGGAGTTACGLRKSKPTFIVPFFGDQPFWGDMVAAAGAGPTPIPYKELTVDKLASGIQYCLSEQARMSAVAIAAKMQSEIGVKAAVASFHRNLPLECLQCDLEPNLPAVWSFSQNRRKLKLSKIAAEVLISHGLIDAKHLTMHSIRPIFIENRRWDPVTGGASAVVGTATDVADSVLGAFYKPVLEYRDYRKEREDQSSSIRSTSSVENLSDTLSGHSISTNYKEEPWDSDVAGRSNSTKRSDTGKRKLLGRMAAASGRSLGSIAPTMIKGTTVDFPLALAEGLRNVPRLYGETPRDHGPVTDIKSGFAVAGKGFAWGMAEAVSDIVVKPYQGFQKEGAKGTIKGVGKGVTNMAAKAGSAMFGLMAYPATGIAQSIRLSVQSQTRKLIAQQRHSEGIWLLESRQYTATDNIVATFGQKFKSKKGRT

SEQ ID NO: 7604 - protein, 443 aa, Arabidopsis thaliana
MLFLFSLQEFGHRVRLATHANFRSFVRAAGVEFYPLGGDPRELAAYMARNKGLIPSGPSEISKQRKQLKAIIESLLPACIEPDLETATSFRAQAIIANPPAYGHVHVAEALGVPIHIFFTMPWTPTNEFPHPLARVPQSAAYWLSYIVVDLMVWWSIRTYINDFRKRKLNLAPIAYFSTYHGSISHLPTGYMWSPHVVPKPSDWGPLVDVVGYCFLNLGSKYQPREEFLHWIERGSPPVYIGFGSMPLDDPKQTMDIILETLKDTEQRGIVDRGWGGLGNLATEVPENVFLVEDCPHDWLFPQCSAVVHHGGAGTTATGLKAGCPTTIVPFFGDQFFWGDRIYEKGLGPAPIPIAQLSVENLSSSIRFMLQPEVKSQVMELAKVLENEDGVAAAVDAFHRHLPPELPLPESSSEKKDEDDRPDLLQWFFIQIGKKCCLPCGGV

SEQ ID NO: 7605 - protein, 1347 aa, Ascodesmis nigricans
MCDRPRYSSPPGHKFPRPRRRSNDGKRTTQSLYLPSRKPMSDDEDDQEDVCAPKKDVPQNLNQSIFQLFTHGRLPSRLSNVEEDYESSGEDYGSANNNGKRPAVNTQPLDPIDESVQAAASAEQDALSEGSRSEYGPAPFMSQVVEAEALLQSSELGGEVSTENAPGFAALEGGNVKPGDLAKKISEIFGLPDLELVETEYPCWLLQSVLLEGYMYITKGHICFYAYLPKKADRNTKTGYLSKRGKSTLKFTRYWFVLKGDVLSYFSDPKDLYFPSGTIDLRYGISASLVETKPGIEPTAFTIQTDQKHYYFKADSATNASEWVKAVQKAIFRTHNDGDSVKIAIPKSTIIDVEDSPVLNMTDTLKINVLDPETHVIDEYFFSFFEDGAEALARIRNVVKAYQDEKASKARSGSSTPLASRSGELSIVPPPREFVRTTVVGRSPIGSLRPSPRHSLEFSRSSFDVCRRSSDYTRETLKELSEPGRHSLDDRSRRRTQPKNSREVSRDSSISSTSYGESSGMRISSSASPSGSQILSRSDVFRSPTMKSFKRSFSRSRKHGKDSEHSGYDEPPSPNATIRLEPPTRRHTADSSHGGIESSHDSEGMLDNHSDPTLQEIKKKGKFPLQRASLWAGWIGERSKKAVGSLIPTQPMEYLEKVSGMWHGGKKNYRHPSGIGPPEDLEHDSGDDLELAEERFRNYFSLPVTENLVAAYFGHLFRVLPVYGKFYLGTRHICFRSLLPGTKTKMILPLEVVENVAREKGFRLGYSGLVITIKGHEELFFEFAKQEARDDCVVRIFQSLDKASDVTEDDYRGGSVNATAEREHTYLKNVHKRLEHKDFTQHFPENSQITEDQDSFFDDGTGSIICFKPEPMNITCLTIGTRGDVQPFIALCLGLMKDGHKCKIATHPEFKEWVEGYGIEFAAVGGDPAELMRLCVEYGMFTVDFMRYTSAKMRGWLDNLLLSSWEACQGSDLLIEAPSAMAGIHIAEALQIPYFRAFTMPWTRTRSYPHAFAVPERKHGGNFNVFTYVVIDNVFWTATAGQINNWRKKCLRLPRTNLDKMQPQRVPFLYNFSRHVVHPPVDFSEHVQITGYWFLDTSHDWTPPQDLDNFIKQARKDGMKIVYVGFGSVTVNDPAAVTQAVVQAVQNANVRCVLSKGWSDRMASKDAHIPEVPLPDSIFQIKACPHDWLFKQVDAAVHHGGAGTTGASLRAGIPTVIKPFFGDQFFFANRVEDLRVGIALRKLNVASLTKALKMATTDARIVRKAQEIGKAIRKENGVDTAVQAIYRDLEYARTLIKKHHHHSYISAANAVDNNPRNDEMEESWTVVSEDDSLTQSVGNLRLSQDGK

SEQ ID NO: 7606 - protein, 1552 aa, Ustilago maydis
MATISSQSRLDSPFESAKEPSTDSASASQPAAAGLGRLNVDDKHDDACMLSQASDNLDTPPFPTSPRLDPWSPRDYSTISSLAGSRELGRPAMEPTTKTFTASSLLPESQSKASMSVTPHAAAATQSGLDLVQADVADVAFHAEPQGLMQMLSLVGSTFFDADTEGYTEDDVEDSDLPTHPLPTSPLITNTHYKPEVHCSESEQDRQTPERSTKGRLRALARDDLSEDGSTPQGSRSPLDASVLTIGPSRAKRTSLTQSDIIAPSWDSTITRATRRPTHLRSQLHHVASASMSASTSKLASRDIDQDGQGTLTTSSPFDEESTDTPHVPPTQQQSMESESMPSDADRPTKWSSDPLLIRPYQDAQASDQRHSDVCESDRLRLLHQLKDIFHLDAAETLLLAQPCWLFRSLLLQGHLYLTSSHVCFYAYLPSRDEKTIKTGLLGKRTRRTHRFSKHWASLKGGKLSWFDSDQDPYFPQGHIDLRKVSAIEPSTTNKDRFKVTTPARRFTFLTEGEHSRDAWVSALQKETFRAQNQGESVRISIPLETIINVETTLSVDGTDMACITVVDEAGDFSIDEYYFLHLTKPSAFISGLNALLNQAVRGSISSLQGGDQALSLSRLSIHDSTSAMHAAAISRKSLEEVPVLAKVRVSTQTDKRIAHPTAVNKTVATQSTRGSSDRQDELDKATSTATSVAVPVSIRRKSQEVSADAALSTTPRAEALNRLSMESSHTYPPSPSTSDPPSSFDEVQREAERGWAIPDWLKSAPAKVLGLATDSSSAASMKSQPTNTGARRRRKVLEKWTDERGDDVSRAESSNTDNDDDVLSHSILSTHSNYSMLDADNEAAETSDHTSVAVEFRDTFGIGEDEGLIGHTHAYLYRVLPVAGRFFVAEHHLAFRSSGIAAKTVGRTLMLVPLHDVISAAKHVAFRPGHHGMVINISGHEELFIEISSAHRRDELLGLIEYQLELVRGGRESRISHEAATRERSNALVLRDLSERIHDGPATASMASSANSSVLSQTGPGFDNQSTSLSQLEEGSSVLSFAPTAPLTFTMLTIGSRGDVQPYIALAKGLLADGHRVRIATHAEFGPWILGHGIEFSEIGGDPAELMRICVENGTFTVSFLREGVTRFRDWLDDLLASAWRACQGSDVIIECPSAIAGIHVAEALQIPYFRAFTMPWTRTRAYPHAFAVPSKKAGGNYNYMSYVIFDQMFWRASAFQINRWRKKLLGLKPTSFDKLEQHKVPFIYNFSPSLVPRPLDWFEWIHVTGFWFLDNPDNSSSKKWEPPVDLVEFIRVARENKRKLVYIGWGSIVVPDAAAMTRCVLQAVKKSGVCAILSKGWSDRLSSDPSTPIDASISADVFQVSSVPHDWLFPQIDAACHHGGAGTLGASLRAGLPTVVKPYFGDQFFWGQQIESLGVGSCVRQLTVDSLAKALVRATSDKKQIDRARRLGEQIRTEDGVGDAVKAIYRDLEYATSLIKRDTRIEHMPMVTRTRTTDTALARRGKDTSVAVQDENDEDGHTSDEWSDIGGGSESSPRDETEVPRSSLILNRLP

SEQ ID NO: 7607 - protein, 407 aa, Glutamicibacter arilaitensis
MRLLMIAPGTHGDVAPMAGLGQNLAAHGFDVAIAANPAYQDVVVSAGCRFRELPGDMRALVNPAAPGAKASPKDLRRYLRELQDYFELAASGTMAAAEHGADIIMANAVAPYAYDVAEAMGIPAIGGHLQPNEPSAAYSPMALGASRSFGPLGNKVLGQLFAASKAPYDPPAKRVRQSLGLPARSRASSERLRRQHRNPILHGFSSAIVPRSADWHEGIVNCGYWWPAADPGWTPSQRLLDFLDDGQPPVFIGFGSTQALEPEFIVDVARRTGRRTIVQGEAEIDEPGILGIGAVPHHWLFPQMAAVVHHAGAGTTAAGLRAGVPAVPVPVFTDQPFWAQRIHRLGSAAEPIAYKHLTAQRLASSITGVLANADLADGARRIARQLAAESDSSIPVIRILEQLRARR

SEQ ID NO: 7608 - protein, 1449 aa, Exophiala xenobiotica
MANLDSPSKPSGGRKLQKRNPNLNRMPSSHIPSRLSLGADAQDDVTAPSRGRNAPAQYMNQSIFSMIAAAGSRTDFNARFDESSDSEEEIDEEKATLVEGEAQPATSMDKATLVQQVMTRDEPSSIEKKSKHLSGNRLVQPLPRPSARALEPKGKESVARQDPSPESDATSESSRSNPRDAPVLSRLLTAEAEFQENDDAAHLIPTSPEGQKSRGRAESLPQTVLATRLMEIFGFEKPEKVVAEYPCWLLQSVLLQGYLYITTHHICFYAYLPRKSHTVAKTGYLAKKGRTTSKYKRYWFSLKGDVLSYYSDPSNLYFPSGNIDLRYGISANFSAAKSKQKECKDFSLTTDHRTYHLRADSASSAKEWVQILQKTIFRSHNDGDSVKISLPVQNVIDFEESPVVEFAETVKFRVIESGDSYAIDEYFFSFFSFGQDALQIFRSLLAESAGERASEDLLSPTRKDTTLSSPKRRPAARNQSPAVTPGSPRAQSSPPIKESVRATLLPFPVDEGGRFSPKMSGEFYRGNSPSRSSGDFGRASFDRGRRSGSTSRLEANQSRGRGQSPLAQHHDSEDSYVQSIDKETDSSTAPLSPRVEAQMSASQILTRSDVFHPPAIQRMETLASMSTEAHSEGGTILSTSPRKETYSPIPIRGAADLLAHYSKDTGARAQEIPVQVEPSPTLQDLVKAGSYPLQRAGAFADYLKNRSMSMKKLLATESMTYLEKVSGMWAGDRKHYGENEGIVPDDRGIDPEDEEANVGHGDRFRAHFALPPSERLQATYFGFLHRVLPLYGKIYVSNRKFCFRSLLPGTRTKLVLPLKDIENVDKEKGFRFGYHGLVLVIRGHEELFFEFSSSEHRDDCTVTLLHSLESVRYMTESSVLAKQDEDDAEVAKEEHRVLQEARRSSTSDHQLVLPDTAEAIYSHEESRPVLFDDPRASIINFKPTSSLRITCLTIGSRGDVQPYIALCKGLLAEGHKPRIATHAEFGPWVQKHGIDFAPVEGDPAELMRICVENGMFTYSFLREASAKFRSWIDELLTSAWQACQDTDLLIESPSAMAGIHIAEALKIPYFRAFTMPWTRTRAYPHAFAVPEHKIGGAYNYYSYVMFDNVFWKAISGQVNRWRKKELGLRSTNMDKMQPNKVPFLYNFSPHVVVPPLDYSDWVRVTGYWFLDEAQDWSPPADLQGFIDKARKDGKKLVYIGFGSIVVSDPAALTKTVVESVLKADVRCILSKGWSDRLGDPAAVKTEVPLPADIFQIKSAPHDWLFRQIDAAVHHGGAGTTGASLRAGVPTVIKPFFGDQFFFGSRVEDLGVGICLKKVNVSLFSRALWEATHSQRMIVKARLLGEQIRQETGVQTAIQAIYRDLDYAKSLVKARAALAGDTAGADVALDEVDIEESWTFIGDESDPDLRKQIQGWESPVRGRGPRVKMDPAGLRSMQGVEPVRKSSMKR

SEQ ID NO: 7609 - protein, 799 aa, Botrytis cinerea
MGNPEQHPRKSESFNWDAPPPYEELYAFGNEESGVSTSVQDNGRISMAFVGNTSPLPPIYVAENVPQVKSEPVKLYPRLNIVIQVVGSRGDVQPFIALGNELQLAGHRVRIATHDVFQKFVRDAGLEFYAIGGDPSELMAYMVKNPGIFPKISTLASGEISKKRKMISAMLEGCWRSCIEPDPETGEPFIAEAIIANPPSFAHIHCAQALGIPVHLMFTMPWTATRSFPHPLANIQSIETDPKTANFLSYGLVDTMTWQGLGDVINRWRKNSLDLEPVPVMAGPHLAASLDIPFTYCWSPALVPKPQDWLPHIDVCGFFFRPPPSYDPDARILGFLEAGPQPIYIGFGSIVMEDSQKMTATIMAAVQNCGVRAIVSKGWSKLGQEVENENENVLFIDDCPHEWLFKHVSAVIHHGGAGTTACGLLNGRPTAIVPFFGDQPFWGNMVAAAGAGPAPIEQKSLNVTTLSNAIKFLLSPDVVAAAQTLASRIQHENGVKEAVNSFHRNLPIKALSCGLLPQQPATWYWKKGKKHLNLSHQAAAILVEKKKIHASDLSLYKPRPLTIINRRWDPWTATTSAAFDGAIDITRAITNIGLDYRTEYTRALTRPPSKKQNETGTEVASSRNPLQAGSIAVGKGFGKVGIAMGKTAIDLPLAFADGFHALPALYGDKPRDYGQVKDWKSGGIKGAKSMGYGIADGFTGFFTQPIEGAMKEGGKGFMKGLGKGTVGFLTKPASGIFGFVSYPALGLYKSLSTSTHQGTQGKILLAQREYGMHLAMTQQISEEMAEKIVEQFEWVIEGI

SEQ ID NO: 7610 - protein, 1757 aa, Ceraceosorus bombacis
MSQLINADSNDSQRRREEAELILLNQDHARTTPPDFNSAPTAFGLDHRMKTQGRGSHSDAMEPTDMHAPPSHDAASQFPSLPPSPRLNPTSPSRAGIAGASTISSLAASPLLGSNRSMSSETPLAAVSDLQAARIGSARDPQRQPSVSSLGGSRERAGSIGALPRTFAPLHLDSHHQKDHGDASGLCRVPTTTQIAISTTTGGDDCDEAGIRTRSTTTSTQSDPGLPEAGEHFPILQMLSMMLSMVGSRLVEAEAEADGFSEPDQGVQHDSAATRLEGTSVYGAQSDAEESNDDEYMAKPSAAGPSQPATANAGLLRRRVKRFQGSRSEIWDDTPTPVGSRTPLAASYSAHAAHEARSPHSLTRPSTANRSSRLARGQSSDREADGDAEESNESDLAASTESLAAAGLAPQASKDRAMASRVSSSTESIPPDPSASLHMLSSAVLDRSRPDCHSDSDPDPESPLPHRLATSTADTPLLSADERKQLLAAKLVEIFGLGRTETLLATHQAFLVRGLLLSGHIYLTSDHLLFYAPLPTTHDSSEGDVLQAGALRKKTRRTMRFSKHWAVLGKRALSWYDSHHSPYFPQDHIDLRDIIEIGSSQHSADLQSADDAQPSRTADAATDHASLDFYVQTSYRRFVFSAASQASKATWVAALRSAVMRAQNDGDSVRLSIPLETIVDVEYGGQTGVGPSTSEIAAMPSDSSSSQTASAVPSRDFLCIKTIDGAGEDFAIHEYFFRHKGEPSNLVEVLSDTIEHHNARPRMERRTSSGSVRDTLAGSWQGRTDVGSTRYSSGRGVEISTSSAPIAKSAPAETDAPMATEMLGPKAIPIPPRAAGEISTLPDRDASSETTLPMSQARLSETPRTPNPLGAGTHRYPPASVAGAPPRSLSSSRGARSSLDSTRMLRPHIFPGWMREAGGRLLSVTGPGAERLSAQLAALARQPHRKVQESWSRPLYEADLGFRDWVGASQAPDGSELGDPLWPGNDCDAVRAVESSLDSSVSSNYSLLEGHADQALLAEEADRDHQFRTSFILPKEEALVYHVSASLYRIVPVQGRVFISTRYVCFRSSRMATKTVGRTLMVLPISELVSVAKHNAFRFGQHGLVLMVRGHEELFLEFGSRERRDECMAQIDYRVEELANDVNRVEQGLVSVGDNATKEALMLRDLSQRISIRQGNSSAPTLSGSLGTTSKRADVPFSPTSHSSAASYPSTSLQSFDHARSLHFTFLTIGSRGDVQPFIALGQGLKDAGHRVRIATHLEFKAWIESHGIEFREVGGDPAELMRICVENGTFTVSFLREGVSKFRGWLDDLLKSSWEACQGTDVVIESPSAIAGIHIAEALQKPYYRAFTMIWSRTRAYPHAFAVPTSRAGGNYNYITYVVFDQVFWRASAGQINAWRKTCLGLQPTSLDRLEPHRVPFLYNFSPSVVPKPLDWYEWIDVTGYWFLRRPDGDQSWTPPDDLAAFLKRAKAASRKLVYIGWGSIVVRDAQAMTRCIYEAVRQAGVCAILSKGWSDRLSDRHLQPTEQTSPQPVSPISEDVFEVRSIPHDWLFPQIDAACHHGGAGTTGASLRAGIPTIVKPYFGDQFFWGAQLEALGVGSCVRELTAENLAAALVKATQSPRQIERAKALGEQIRKEDGVKNAIAAIFHHLDYATSLIKLNTRLPGAVEVSTKQPIDQQHSRPDRQPDNEQPAHNLEIALSTTSGSGDMSHSDNLPPRITTAEPDMQGSIASINSGMQTSDAEWSVVSDTDEFAASQSS

SEQ ID NO: 7611 - protein, 1426 aa, Beauveria bassiana
MATSPPKSASGGQDRGLQSNGRGPHKVSTRARGLSSSTPDLPEPLQDSDDSGDEAHAQVTANPMSVNMNQSIFGLIAAAGSRVDFHTRFDGNSSDEDDGSKDLPSGLPTTSQTTVLRPDSRKHKKTLSKHRLLKSFATLPRLKSKSKREPSTLSQPDRFTDELCQSSDASETPASPSTETMAPMARRPSVMSRMLQARAEMSSRSSFDIERRPSTDIPQSQDDDDEASPLARRLMEIFDFSEPEQVIEEYPCWLLQSVLLQGFLYITSKHICFYAYLPKKQNIVAKSGYLSKSGKRNPKYNRYWFRLKGDVLSYYRDATNLYFPHGQIDLRFGISASVTDRDKDGLHFEVVTSQRTYNFRADSAPSAKEWVKSLQRVIFRSHNDGDSVKISLPIENIIDVEDTQMVEFSDTCKIRVIDNDETYAIDEYFFSFFSFGQEAINVLKLFVEDSTARKQLGKDQAVAGTSSGAKTGLGKIHTGKIHDTVKATLSPLSPRRSTTASPRGSVEFSSRTSRDGFEGTDQSSRDQSRPPTSSFIDHSPRRSFSSSRPRSRLSDGGKTPRTGFVPSDSNLQSEKSSMEQPSFSSLHVSGTEDPSASQILHGSGAFQRPTIMRSQPTDQGHLKSLSQSQILQPGSDATFRPARHAATTGHLDQLRQEDEQEARDEDRPLTPSLQSITKMGTYPLQRAGAFADYLNKTSKRMSSLLATESMGYVEKVSGMWKGGGKHYDEPAGLRGDDDDLEEDSDGKIQTSMERFRAHFALPDTERLQATYFGYILRVLPLYGKIYISNQSFCFRSLLPGTRTKLILPLKDIETVHKEKGFRFGYSGLVLVIRGHEELFFEFRQSDVRDDCAVTLLQDLETHHFLEGPDTQVEDAQDDDEYMAERDALKSARQEEYPEHELELPHEVSSLPNAPTILLEDTDASFLSFKPSTPMKITCLTIGSRGDVQPYIALCKGLLAEGHKPRIATHAEFQGWVESHGIEFAKVEGDPAELMRLCIENGTFTLAFLREANSTFRGWLDELLDSAYTACEGSDLLIESPSAMAGIHIAEKLGIPYFRAFTMPWTRTRAYPHAFIMPEHKMGGAYNYMTYVMFDNIFWKATAQQVNRWRNKTLGLPNTSLEKMQPNKVPFLYNFSPCVVAPPLDFSDWIRITGYWFLDEADKYTPPQELADFIQKARDDGKKLVYVGFGSIIVNDPAKMTKEVIDAVLRADVRCILSKGWSDRISSKEDPSKTRPDEPEMPPEIHVIKSAPHDWLFKQIDAAAHHGGSGTTGASLRAGLPTIIRPFFGDQYFFASRVEDLGVGVWVKKWGTNSFGRALWEVTRNERMIVKARVLGEQIRKDHGVDMAIQSIYRDMEYATSLIKRKAGKNEQPEPDEDDEDTEESWTFVGGDEPDPDMVTKKLSEGLDNLVLEKEKARRNHAVRSGA

SEQ ID NO: 7612 - protein, 1427 aa, Pterula gracilis
MHHHVPDPQPAFKFHGVPVAAHDVDTSPESLGMSTDQQPTSTEQQSPGSSRLKRAVDKTVDKVGETLGRSKSGKSSSTNGSPGQSRSRLFSLSRRRKYADDSASSDVDSNEISATPSRPSMTSRKSSSDNAASPRPSGEESPFIRPPSPSTSNTRPSLSAFRGDGSVRAGTQSLIQALQALPWSEGSDDSSSDDAGTDEGAEPLASSLHTIHRPVARSRRTALAHPGFEQHPIHESIVEASEESESDMNEDFDQHTPRISHASPPMHAKAPPALARTGTVMNPRNSMTRTGSMATVRLQRRARLAEKLRDIFELDGIEEVWAEMPCWLLRSILLQGYLYITNSHLCYFAHLPSREDQVLKSGSLNKKAQRTKRWIKHWFILKNDALSWYQSSSDPYFPHGIVDLRYAISCDPLNEKDFRIRTNQKAVHLSADSIPSRDEWVKAIRKVMFKAQNMGDSVKIAIPYSAIIDIEKSSAMDFSETIEVKVLDKEEQGATDSYFFAYFHEIDSALEQLRHAVRAHRAQPALGSPGAVMDTTIGRLTAVPLDRVHSAPISDPHSLTAHSSSASSSSFKLPSFLRPFHDSSSTVAASPLARAESSPEVGPQHEEFTHISRSTNSFVPHEEPSSLGLKTDVEGSALGGDVATPRPGALDHSHTYPPSSSTTSDAGDNALRLVPSSSSTLSNWSVGVPSWLKSGGTRRPLSGGSNSNFDPSDLTASQKVREMYTSADESASSRSVGDMAFSVLDSPNTVLDDEVVEKFHSTFAFDEKEVLLGYVPGYIFRLLPVYGRLYVSSNFFCFKSTNPLVKTRMQLPIRDILAMEKSKGNRLGHHGLIVVIKGHEELFFEFGAVDKREVFYRLLDRQMEDIRKRVANGETESVSSGKREALVLEELEAPPTAAEPNPATDAMSESLPALMFTSASSTFLTFKPATPLRFTFLTIGSRGDVQPYISLAKGLMAEGHHCKIATHGEFQEWIESYGIQFGFVGGDPAELMRICVENGTFTLSFMKEGVQKFRGWIDDLLKTSWTACQDTDVLIESPSAMAGYHVAEALGIPYFRAFTMTWSRTRAYPHSFAVPEHKMGGGYNYMTYVMFDQVFWRATAAQINRWRRRTLHLESTSLDKMEPHKIPFLYNFSPSVVPPPLDWPEWIRVSGYWFLDDADVSSEKWTPPDELVQFIEAAHQMHKKIVYIGFGSIVVSDPRTMTRCVIEAVVRSGVCAILSKGWSDRLQADTRDVPETEAEEPLPKQIYQINSAPHDWLFQRIDAACHHGGAGTTGASLRAGIPTIIKPFFGDQFFWADRVEALGVGSGVRKFTVDTLTDALSAATTDVKQIDRARLLGEAIRSENGVATAIEAIYRDLEYARSLIKGGPRQDDDGTIKEKRNSAHSSVTSLHNGSEDWSVISDQDDSGSSPERSKRSSIAHVVKSVLP

SEQ ID NO: 7613 - protein, 806 aa, Elsinoe australis
MSKGTDVHETSSDDEADTPPPYTQNDVLNQAGLRTDMKGDGRIDITIDSGVARRFSQLLQKRSIKAEEPSLEITKSWNIPMNLVIQIVGSRGDVQPFIALGKELAKSNHRVRIATHSTFKSLVEAAGLEFFSIGGSPEDLMAYMVKNPSLLPSMRTLRSGDIQRKRAMISEMLYGCWESCIEAGPCGTPFVADAIIANPPSFAHIHCAQALGVPLHLMFTMPWTSTTAYPHPLANINYAGVDTSIANYISYGVVEFLTWQGLGDVINKFRGKLDLEPVPTSEGPGLAESLNIPTTYCWSPALIPKPADWSSAISVCGFSFRDPPDYKPPQHIADFLESGSTPIYIGFGSIVLEDPVGMSKVLVDAVQSSGVRAIISRGWSQLSAEVDSNTILFIDDCPHEWLFQHVAAVIHHGGAGTTACGLSNGRPTAIVPFFGDQPFWGNMVAEAGAGPEPIPWRSLDTATLSKAITCCLSPKTTSAAGRIAMRMREDTGVWTATRAFHCHLPLDTLPCSILPDQPASWILDKKSIRLSKLAATILVKNGYVQGKDLKSLATQPIFITHRRWDPLTAGSSALIGTAANMLKFAVGIVRAPYDEIQASAKQEKEMAKKQDMIVLDQDSGASRTTNTTTPASAAFRAIGASARSIGMFNASLFKGTMIDMPLAITEGLRAVPKLYGEDVQNHGVVDGWMSGGVVAGKSFAHGVASGFSDLVNLPLKGSEEEGALGFAKGVGKGTLGFTSKTTAALLGLVAYPGQGICKSIHKSVRSKTRKQVEKNKREEGAYLLSQNRDEGLEEKVVRLYDLLKNA

SEQ ID NO: 7614 - protein, 419 aa, Marinithermus hydrothermalis
MQVAIVAVGSRGDVEPYVALGAGLVARGHEVRMLAPQGFAELIAPFGLEYLPLGENPRALLEALEVRRAFAAGANPYRFVRELLEVYRAFLPGFLRALEPGLEGADRVVFSTLGFPAYHWAEARGVPAVAAFLQPQTPTAAFPAPFGPSPPFLARCGLYNRFSYVAMEQFAWFLVASQTNRWRRALGLAPLSWRGPYPRLRRGAVPVLYGFSTAVVPRPRDWPDWVRVTGYWRLPLDEGWRPPGELQAFLEDGPPPVYVGFGSMRPPDVRRFTEIVLEALQLAGVRAVLVRGWGGLDPERVPDSVYVLDAVPHAWLFPRVAAVVHHGGAGTTAAGLYAGRPTVTVPFIADQFFWGERVAALGAGPRPVPAKRLAPNALARAIRAAVERFAYRRNAEFLARRLCREDGVMEAVRGVEDLA

SEQ ID NO: 7615 - protein, 1435 aa, Sclerotinia sclerotiorum
MAPDDESKKRATRKSTKRWKEEHQVATEIPERFREGDDEDEDCTAGHALNKSVFGMIAAASSIVDFNARFDAQSSDEEYDLGKPTRQSSESHINRSSIDQKMGKFEGHRRLLSESKILRSFSRFSSRSKSKSSNTIARGSRTPSPLRESRQEPTSPEIRYSPLQPKDTPVMSRMLEARAELSLRPSFEMPRKSKDPAEVDDERTSPDSLAERLMEIFKFETPEDVLEEYPCWLMKSVLLQGYMYITTKHICFYAYLPKKANEVVKSGYLSKSGRHNPKYNRYWFRLKDDVLSYYTNPSDLYFPSGNIDLRYGISASIVEKEKGKDSTHFTVETHQRKYNFNADSAPSAKEWVKALQKIIFRSHNDGDSVKISLPIENIIDIEDSRIIDFADTCKIRIIDNDETYAIDEYFFSFFTNGKLALSVLKILVGDTAAQKIPEELLSPLSTADDSRGSSKRTSFQVSRDRKLHGPSVQPNAPALEETVRATLSPLLAPGAGSPRASTDMSLSSSDIFRRSLDINKHGRRSIDLNRLTTEHHRSNSANSISTRRSLSTNRLDQEKRTSKQGSSDSYVHSLEEPGSSEALPSASDETQASASQILRGSDVFLSPTIQHSPSVACNRNKDEIQGPKSRSLTSPIKSADVSPTRTQRPQHPKHAATTGSVSDSNVGQAEISSGPSLQSIVKAGSYPLQRAAGFAGYLNRHSKRMSTLLASESMGYVEKVSGMWKGGKKHYEEPHGIPRDNEMPSIGDDDDNRDGATPADRFRDHFALPPDEKLHATYFGYLQRVLPLYGKIYISDRSFCFRSLLPGTRTKFILPLKDIENVDKEKGFRFGYSGLVITIRGHEEIFFEFNQAENRDDCAITLLQNVETMQYMQDSGLLTMYERESAEMAGAEHRALIQARRGIRSEHDIDMHKAADGGSQSISFDDPRASILNFKPTEPLRITCLTIGSRGDVQPYIALCKGLMAEGHQTKIATHLEFKEWIESHGIEFAPVDGDPAELMRICVENGMFTVSFLKEASSKFRGWIDDLLSSSWRACQNSDILIESPSAMAGIHIAEALRIPYFRAFTMPWTRTRAYPHAFAVPEHKLGGSYNYVTYLMFDTVFWRAISGQVNRWRQKELNLQATGLEKMQPNKVPFLYNFSPSVVVPPLDYSDWIRVTGYWFLDEGANYTPPKDLTDFIANARADGKRLVYVGFGSIVVADSAVLTKTVVASVLKADVRCILSKGWSDRLEKKGANNVEIPLPPEIFQIKSAPHDWLFSQVDAAAHHGGAGTTGASLRAGIPTIIRPFFGDQFFFGQRVEDLGVGVLIKKINVSVFSRALWEATHSERIITKARVLGEQIRKENGVDTAIQSIYRDMEYAKSLIKCKEGKSDDDTLEDSEESWTFIGDDTDPELIKRFYDWESMAHSGTLSDKNMMAWSGSDVASAALSPTRKAA

SEQ ID NO: 7616 - protein, 1415 aa, Aureobasidium pullulans
MLGARVRHSGAPSILVPRPRYCIRKQAGSPSPAAALQPELALSLSLNMTSRRNTPQARRRVSMELPERFRFDDDDDEEDQDQELDRAQPIDMAMMHQSVFGIIAATQSKANTMRSMLQEADSDSDDTTPPPTRPNRSTLDPTTLPLRQSPLSRNKHLKRVSEPNLVQSLPGLRSAPKMTFATTTPTRFSKSDDLPEPIHHGRTDLESSQSTITKPASRKPIPVPDMSSSTTQVALPDALKDIFDFDEAEKVVAKYPCWYLQSVLLQGYIYITQRHICFYAYLQKKTGVTIKSGYLTKRGQRNPRYKKYWFVLKGDVLSYYKDPSTPFSPRDVIDLRYGVSADLTAAQGQDKESTSFSVTTDAKTYNFKAETASSASEWVKQIQKVIFRSRNNSDSVKICLPVDNVVDIEESNYPEFADTIKIRVIDNDETFAVDEYFFSFFGFGEEALRVLRSLTQETSAQRVLASRPVSPVITMSDRRPSSTHGRRSRLPSMSPAPGGIHENVTATLSPASGLTSRSARSSSELERSTLDLTQGREETLASRATTQRNSQKQKWGAFQQDSSESYVSSSDQGNDSEMSESAAGTDASGSHILSGSIMFHKPTIGKHHTDNVALHNAKASPQTDAPFASSNEAGKEPEVRASTRKTSDTETQDMRQSDSSALGGLMKVGAVPIQRASGFLYNSSKRVSGLFGSSPLEYYDKFSGMIAGGKKHYAEADELVPGEEVHDSEDEMTVREAEKSFRNHFALPDSEKLVATFFGFFHRVLPLYGKLYVGSTRLCFRSFIPGNWTKLVVPFKDIMDVDKERGFRFGYSGMVVVIRGHEEIFFEFGSQDLRDDCTITLLRSLDTTEPFQESVLLTEDEKRDAEAAAAENLLLQEARQGDQGGVELQPPRSLDQSDRESPAIFFDDPAASVLDFKPEGSLRITCLTIGSRGDVQPYIALCKGLLAEGHRPKIASHAEFGDWVRSHGIDFAPVEGNPAELMALCVDHGMFTPSFLYETNQKFWPFVRGLLKTAWAACQDSDLLIESPSAMAGIHIAEALGIPYFRAFTMPWTRTRAYPHAFGMQKSRMGGAYNYMTYVLFENIFWKATSFTINKWRKEDLGLKATSMEKMQQDKVPFFYNFSPSVVVPPLDFGEWIRVTGYWFLDEANGFTPQKELVEFIKKARADKAKLVYIGFGSVVVPDPKQLTQDIIAAVRKADVRCILSKGWSDRMDKGKAKALEVPLPDFMFQIASAPHDWLFRQVDAAVHHGGAGTTGASLRAGIPTIIKPFFGDQFFFGSKVQDLGVGQKVLTVTENALGKAIWIATHDSRMIEKARILGEQIRSEDGVGTAIKAMYRDMEYAKTLVQQRVARAAQGDTDAEDAEEAEVEDSWTLVENDSDPDATSPTAMMQPQSPSLGSSKGKSKLGLKYLPLRS

SEQ ID NO: 7617 - protein, 602 aa, Panax ginseng
MPENNATSSGEVTVKEVTRGSTSGSELDSKEAVAASLSNNSSGNASRNFPRVNTLPPDILSSDKFMPPSSQFKLERSKTESRHNNIFAEEAAQIFDDKIPIKEKLSLLKRIATVKDDGTVEFEVPGDVEPQALGVRPQNVYNELDDDPLDAAELQDIPPLQIVILIVGTRGDVQPFIAIGKRLQYYGHRVRLATHSNFKEFVLTAGLEFYPLGGDPKILAGYMVKNKGFLPSGPSEIPVQRNQLKDIIHSLLPACKEPDVDTGIPFKADAIIANPPAYGHTHVAEAMKVPIHVFFTMPWTPTSEFPHPLSRVKQPAGYRLSYQIVDTLIWLGIRDMINDVRKKKLKLRPVTYLSGSQGSDADVPYGYIWSPHLVPKPKDWGPKIDVVGFCFLDLASSYEPPESLVNWLNGGTKPIYIGFGSLPVQDPEKMTKVIVEALEITGQRGIINKGWGGLGNLAEPKDTIYSLDNVPHDWLFLQCAAVVHHGGAGTTAAGLKAACPTTIVPFFGDQPFWGERVHARGVGPAPIPIDEFSLPKLVDAIKFMLEPKVKESAIQLAKAMEDEDGVAGAVKAFFKHLPCRKTEAEPTPVPSGFFLSKCFGCS

SEQ ID NO: 7618 - protein, 2762 aa, Chlorociboria aeruginascens
MPPEEETPKTSAFERKRSANLAINSALLPVTRPTADQITPRPNPKQRSTVSRKKATPVEKEGARRTSSRLAGIEADSETHKRKAEVEYEFAKEQSRAKKRRVSGDLNISDVLVEGKKWDKGYNFLSGVMRGAQPNQRTFTEDDIKETTDEGLRALREKMSGLQLYEGYEPSHIKITPERVYALGFHPTQTKPLIFAGDKMGNLGLFDASQAPPEVKDEDDEEAEVPEPAITAFKIHSRTITSFVFPPDGNNLYSSSYDSSVRKLDLQKGVAVEVFAPESLDIDLPISSIAIPSTDPNLLFFSTLEGSFGRHDIRTPSDTEIWQLTDKKIGGFSLHPLHPHLFATASLDRMLKIWDLRKIVGRGDDRHPTLLGEHESRLSVSHASWSPAGHVATASYDDTIKIHSFTDAGTFKVGQDLDSDAMAPTAIITHNNQTGRWVTILKPQWQAAPEDGIQKFVIGNMNRFVDVFTADGEQLAQLGGDGITAVPAVAHLHPTCPWVAGASESFIALVTTYMQHVMTTSRLTLPSYYCQEIPAVGVGWGLASKFPILIDTKDDLKKRIARKLTKRRKEGHQATMEIPERFKDGDDADDDCAVLPGSSMNQSVFGMIAAAGSKVDFNARFDGQSSDEDEEDTNVPIPSPASDLKVEKTRREESTEKPEKSEKHHRRKFSENRLIKSIPRLGLKSKSKSPATSNKSPVSSSLEGPAAPEIILPRTPSKDAPVMSRMLEARAELELRPSFDMSRTLDGTNINDTEDGTSSNLAKRLMEIFHFEKAEEVIAEYPCWLLQSVLLQGYMYITTKHICFYAYLPKKSNEVVKSGYLSKSGKRNPKYNRYWFRLKDDVLSYYSNPSELYFPSGNIDLRYGIKAVVAGKDSGKDATHFTVETHQRIYNFKADSIPSAKEWVKALQKIIFRSYNEGDSVKISLPIENIIDIEDSQIIDFADTCKIRVVDDDETFALDEYFFSFFSFGKEALGVLRILVEDTTAQKIPEDLLTPVPPSHEGLSPRGGGSKRNSMNIIPETTGEKSTRPPPPVRKVTPVFFEDTVRATLVPLSVSGPGTQSPRASMDINRQSSDALRRSIDLNKFGRRSIEIGRLTMDGAGRRSMSASRRSLSRNRMEGRHQSEKQGSSDSYVHSLEDPGSFGALPSASDDTQASASQILKGSDVFLSPTIQRSSSATCQRELGDASSTEQFARSLSRTEDRPKPRHAATMGSESSHTDRIEPSGSAPTLQSLVKVGTYPLQRAAGFAGYLNRHSKRMSTLLATESMGYVEKVSGMWKGNKKHYADPQAPMPDDEMYGEDEDDQGSGDRFREHFALPATEKLQATYFGYLTRVLPLYGKIYISNRSFCFRSLLVGTRTKLILPLKDIENVDKEKGFRIKYSGLVIMIKGHEEVFFEFSSADARDDCAITMMQNLETIKYLTESGFLTTEEREGAETASAENKALLKARNQVNMPRPPYTVTDDSPPILFDDPRASILNFKPMESLRITCLTIGSRGDVQPYIALCKGLLAEGHKPKIATHKEFQLWIEENGIEFALVDGDPAELMRICVDNGMFTYSFLKEASSTFRGWLDDLLTSAWAACQNTDLLIESPSAMAGIHIAEALGIPYFRAFSMPWTRTRAYPHAFAVPEHKMGGAYNYISYVMFDNVFWKAIAGQVNRWRKRELGLQATNLEKMQPNKVPFLYNFSPSVVVPPIDFSDWIRVTGYWELAAPSDYVPQKELTDFIQKARDDGKKLVYVGFGSIVVTDSAALTKTVVDSVLKADVRCILSKGWSDRLDKQAANRAEIPLPPEIHQIGSVPHDWLFSQIDAAAHHGGSGTTGASLRAGIPTIIKPFFGDQYFFGTRVEDLGVGITIKKLNVSVFSRALWEASHSVRMITRAQVLGDQIRKEHGVDTAIQSIYRDMEYAKSLIKSKTGKTGDDTLEDSEESWTFIGDDNDPELVRRIHDWENTSQSAANAQKHQDSWGKSEKLKPHDHKKRDTAKEEDTMGKLLRLGTKLKYPITISNVLKVPGDIITRKEPIFQYKFTWLKKVGDPFGEEWDEEQTTIADYDSPLDGNIKEWMIHEGMTVDKDMDFVEIDEECSHAIQFAGLCGICGKDMTEVSWASASMDAERAKINMIHDQTKLTVSETEASRAEEDLQRRLLKNRKLSLVVDLDQTIIHATVDPTVGEWQSDVNSKNYEATQDVKKFQLNEDPNVYYVKFRPGLMRFLDSISELYELHVYTMGTRPYAQSIAKLVDPTKRLFGDRIISRDENGSVMAKSLARLFPVDTKMVVIIDDRADVWPHNRPNLIKVVPFDFFPGIGDINSMYLAKRQDIPKLAPPKKVVTETPENKEPELAGLTEATETVETPEETPMPEIQHKAEEKGKPERSGANDDAPIGDRVSAFEELVRMSGGDDKELLQEQADEQEKLLEKQVSERPLKHAQELLDQEDCGSNNNDNHKLLTEDDDQLVHLERSLTLVHKSFYDEYDSALHNAQGGRVAQLKPGRNKKVAIKEPAADLKIVPDVGMVMPRLKAQVLADTIIVFSGLVAIGVEPEKSEIGVQALAFGASLLSQQIATPKDEELANATSSLQDSDESNDDTDDEEESFSNSQEEQDDEGVMPDDVKGGLSPIDDLKKFDWGEIDDELKEFMGSEEDSDSDSGSDTSSRSSVRNTPQKRKHDELTTDNDDSDGESTLSKKQRIAGTRGTGLKTSKTPSASQSESSLPTPGVTGDENDDGEESTDPAPTTDDFDDDLEADLEKEMMAEFEREEQEARDSGGGEST

SEQ ID NO: 7619 - protein, 407 aa, Gloeocapsa sp.
MRITILAIGSRGDVQPYIALGLGLQAAGHQVQLASYARFAEFVGSYGIEFAAVGANPQEYIQALAKNVDYWRIFSDNLEQLLEDCWNCCQGTQAIMYSQVALPGYHIAEKLNIPCFAAFTNPLTRTRAFPHPLYTSSANFGGTYNWLTYVVHEQLRWQSVRQKINRWRQDLGLSPVPFAGLYSRLQQQQIPILHCFSPTVIPKPKDWSDWAYVTGYWFLEHLPEWKPPTDLVNFINSGMPPIYIGFGSMSERNSETVINLVLDSLVQTKQRGILFSHWGGLQNVDLPDNVFLMTSSVPHDWLFPLCRAVVHHGGAGTTAAALRAGVPSVVIPFGVDQPFWGQRVADLGVGTLPIRQQELTQDKLIAAIHDVIDNKIMIDRARVLSDRICAEDGVKRAVEIIQSYLHA

SEQ ID NO: 7620 - protein, 1585 aa, Cryptococcus neoformans
MSPPISPTPPPLQPPFPPTAIARGPDRPDPPPQHQQAAESLVNAAAQHVAPTCPPTSDELPQMEDQATNSSNDSLIPSRQAPNQEETENAITAGTPPDEMEPTKDAQTVRFSSSSPASYSTHEYPTEEINEPRTSSRAPNTASSQMAESSFDFRSSRDIGSIRMGASALVSALNALPWEEDDDSDDGEDDDEFIEPARGSSSTIYERKQRPQTPSTSHGFHPTHTLHFPFRQNAIARRACQPGTTELDYQYATPETSSRRTSAAGSESSSEGEVPLPKGFVSHPNLIVPSGEGEAAAHPDPKLISDRITKEQQIADVEEQAEILRSAEEQEMRLGKEFVPPKSRDSADLNVDAALREGGSEREDVIEEQMQTNEAEKRLTRNEKLAERLMEVFGLEEREEVLEEMKCWLLRSVMLKGYMYLTKRHICFFANMPNENNLLVKSGPLHKKASRSKLNTKFWVVLKNDVLSWYESTSDPYFPKGNISLQYCHSCDAVSGTRFKVRTSERNYTFTADTESSRDEWVKAIQKVMFKTQHEGETIKLIIPLEAIVDVEKSPTLEFTETIEVKCIDAEDQMSVDSYFFASFPDNDYAFSAIQKLVRERPSPPELPRISSVTTIHANQEPLDTSHATIKRHGTDSSAEKLGMASHRPFRKISSVLKPLILKSSDGEPLEEHSQGPHHNDEDASHLPHIEAISNRRRSEEESDNDYFDGYPPRQVGPPPPSMNDDARNWRPSWIRKPASKLFGSSPSGSFVSHPGRLPTDSSTTVTESGPSLRSRTGRTKQASVTEVIEPPIQYEEEVSEDEMSNKPSVVDSNSAETARKRAARLSWTSETSSGSQMVKSKSDFSMLGSESGHSESAETVRKFRTFFALSDKEELIDHFPGYLYRVLPVSGRFFISTNYFCFRSSQLLYKTKESFRLMIIPIRDLYGLKAQKAFRFGHSGLTVVIKGHEEIFIEFRSASRRKACIALLEERMEAVRLSGENTIVDSHKIEARIMEDLDESTPVEPKSPWPVSPSPLFGSTTSTSFLEFKPEPMKITCLTIGSRGDVQPYIALCKGLQAEGHITKIATHGEYKAWVEGHGIAFESVGGDPAELMQMCVDNGMFTVSFLKEGLQKFRGWLDDLLNSSWEACQGSDLLIESPSAMSGIHVAEALRIPYYRAFTMPWTRTRAYPHAFAVPEHGRGGPYNYMTYTMFDQVFWRAISGQVNRWRRNVLGLDATTFDKMEQHKVPFLYNFSPTVVPPPLDWTEWIHVTGYWFLDKADEKQGEKSWTPPQGLVDFIDKAHGEEKKVVYIGFGSIVVSDPEEMTRCVVEAVVNSGVCAILSKGWSDRGSKKGEPKGDSEGADGVKYPPEIFAIDSIDHGWLFPRIDAACHHGGAGTTGASLRAGIPTIIKPFFGDQAFWAERVESLNVGSSIRRLTSHQLASALIKATTDEKQISKARVVGEMIRKENGITRAIEAIYRDLEYAKSIIKSLPSTDDRTPERISSLLHPLTTADLSFNRVRSRSRSRSRSSQGRFSPRRHTVDDDGWSVVSGGSRSRSGSASAVTSPERRPLNIGSALGSHVFKTALLPNTFGKWRNLEEGDDR

SEQ ID NO: 7621 - protein, 842 aa, Rhizoctonia solani
MIIPNGHDDKSAPSQHEDQYIRDIRLSSECGVNPQFTSGSALPESDDEEPGPPQYEAPIHGTRSLQPLVDDKSGKDNKRESILSQPSTSSSIPEPEPDAEFRTAAMQASAAFQSDGRFQVSIDESPGSLPREYASPIDEPGVDLSNFANAPPMNVNIMIVGSRGDVQPFLALGKRLRQHGHTVRLTTHETFRQSVKEAGLRFFNIGGNPHELMSYMVRNPGLMPGIESLTNGDITRKQMMVAEMLERCWRSCYEPDDVQEGSLSFSADTIISNPPTFAHIHCAEALGIPLLMSFTMPWSPTTAFPHPLVNVRTSQAEPRMTNYLTYGLADAMAWQGLGHTINKFRRKRLGLPPISGAGIIERCNVPWTYCMSPALVPKPQDWANHIDVVGFYFLDLATKYTPPEDLVEFLGVGKPPIYIGFGSIVVQDPIAMTKTILSAITQANVRAVVSAGWGSLDSSALHDAQNPNIFILGNVPHDWLFERVSVVVHHGGAGTAAIGLRCGKPTVVVPFFGDQPWWADQIYARGAGPAPIPHKQLTTLALVDAIKSALSEETKAAARRVGELIRSEDGVKNGMDSFHRHLPLLNMRCDLDPRKVATWYSRSHKLRLSAFAAQVLAEKGVLDVNKLELHRPREYITRVHHTNPFSGTLSPAVGVVGDVVGGVGGLFTARPEKGVIKLVKAGPEAARGILEGLHHGMNNAPKIYGGSVREPGKVTGFKSGLREGRKSVVMGFYDGFTDILKEPVNGFKKHGVLGGVGGVVIGLTNAVVKPTAGIVGMLSQPVEGTFQSARSLLAKPATERHATRYAEGVAAFKESNEAEREAVIRMFEEKARSRMKGKQKSA

SEQ ID NO: 7622 - protein, 997 aa, Schizophyllum commune
MPQVPYYMRDPEASPPAYEASGSRSRSQSPRPVTVNGTDINYAEWKAIGKGLVSAARVAPDGRIGVTLDLKERLPDLPEDHAPQVAEFGVDEGNWQKYPSMSIVIMIVGSRGDVQPFVALGKRLHSDGHRVRIASHEKFREFVNEHGLEFFDVGGDPQELMSYMVKNPGLMPGMESLTNGDIGKKRKMLSEMMNGCWKACHSPDQKTGRPFVADAIISNPPAFAHVHCAEAMGVPLLLSFTMPWCATGAFPHPLVDISFSNAEERLTNYISYALADILTWQGMGDIVNKFRNRALGLPSLSVRSGPGLTDRLRVPWTYCMSPALVPKPSDWSNHIDVVGFYFLDLATSYSPSEDLKAFLDAGETPVYIGFGSVVVDDSAEMTRIIFEATKRAGVRALVSAGWGGLGGVSVPPNVFILGNIPHDWLFSDGRVSAVVHHGGAGTTAIGLAKGLPTVVVPFFGDQGFWGDMIHKAGAGPEPIPHKKLTAENLAAALTFAISAPAKMAAQQMARQIDSEDGVRAGADSFYRHLPLLNMRCDVCPERMAVWWSTELCLKLSAVAAQTLVDAKEIKMENLDLHRPKEYDSRRAYNDPLTASASGIFWTILHHYAAVAQIFTSPMNGIVKTTTAIPQGIYKIVIGTHEGFVNLPTLYGSEVRKSGPVKGIASGIKEAGKVCYIDQSLVTEPVKGAKKEGFMGAIKGSARSFVNVTLKPAAGIVGVIGLPLQGMLRSIQSPHSERQEKDQRAARLQEGIEAVKTLSKKQRDEIPRAFWALRAGTAERRRRLTALAEEQIKEAEEQGPVERPVFDSTDSASTLSGRSGSAEGSARGEGNTVVGGASSGSNLGHVKSRSAESTSSASVRSFGASSTSGRSVASSSSPRVHFNPIDTAKGPSSPGKYAASRSGKQSSSLGKKTSIDYDKLYEDDLAYAMRLSQLEGPTVDGAAGAPVSLSTGEAPLAMPGSFETEPEPPHETTAASREDADEQAFQRDMDLAMRLSLG

SEQ ID NO: 7623 - protein, 1131 aa, Auricularia subglabra
MSTIRQNRRAQLAKKLAEVFEIEGIDEVVAEMPCWLLRSILLQGYMYLTNTHLCFFAHLPSKEDQVLKSGTLNKKAQRTKRWNKHWFVLKDDVLSWYHTSTDLYFPHGVLDLRYAISCDAQGEMGLRLRTTQKIVELSADSVPSRDEWVKAIRKVIFKAQNLGESVKIAIPYAVILDVDKSSAMDFSETIEVKVVDKDQHSGYSVDSYFFAYFKNLEHALEEIRQIVKTYRVSPTQEADDVVKDTTAARSPSHSHTTFDHAHAATEDSRSSKFMSLLKPFSTTDATAALSQSIKRLSSEFPFPTSSSPGHGTPTSPPPSQEDVSSSTSTLARQSRHGLEGDPATILGAPLQLSPSPSQSSSSAHTYPPSTNSRPVPIELPSASSWNFPQVASWLRNPTKLFSAPPGAQRGGVVEVLSHSRRHSHSMPQSGDNSQEFGFSILESHDAGHDDVDPMIADKFRDYFAFDERESLLGYFPGTLFRVLPVPGKVYVSSNHFCFRSSSRLTRTRMIIPIRDILSTERTKPFRFGQYGLVVVIRGYEELFFEFNGADKRNACADLLAVQIEGAHARLHAGDVSSPAPSKRETLILEDIEQEDIMRHHRHDSEPRPPPESGSETVPAVMFTSTSSTFLTFKPQESLRITLLTIGSRGDVQPYIALGKGLIADGHKVKIATHAEFKEWIESHGMEFGYVGGDPAELMRICVENGTFTVGFIREGVQMFRGWIDDLLKTSYEACKGSDLLIESPSAMAGIHIAEALKIPYYRAFTMPWTRTRAYPHAFAVPEHKMGGSYNYMTYVMFDQVLWRGTASQINRWRRRLLGLPPTNLDKMEQHKVPFLYNFSPAIVPPPLDWYEWIRVTGYWYLDDADVSAKKWQAPQDLLDFIASARDAGKKIVYVGFGSIVVPDPTSLTRTVVDAIQQSGVHAILSKGWSDRLANKKRVAQTEPEIQLPSSIFPIASVPHDWLFSRIDAACHHGGAGTTGASLRAGIPTIIKPFFGDQFFWADRVEALGIGSSVRKLTVESLAQALHAATTDEKQIAKAAIVGQQLRAENGVATAIECIYRDLEYARTLVHRRHSDHLEENATIREKNYSLPSSSDHSPSNESHNGSSAAGAPSEDWSVISSGGPDEDRRAR

SEQ ID NO: 7624 - protein, 437 aa, Asaia platycodi
MKIVIFTIGTQGDARPFVALGQGLARRGHDVCIATSARHESLIRGGGLGFAPIESDFADLMTQEHAVLEKGNQLRMGWQVARALCRWMPLWVRQAMEATKGAELVIGSGSGTILGASIAQRRGIAFVQAQFMPMTPSKWVPPLWPNPALRLPGILHKALTHVARFLIWRFMSFPVAIMRRELSLPPIGWKGPWSETDSAGNRRYLLYAFSRHIQPQPADWSRDRIAVTGSWFYDQKTSWRPSPELEAFLAAGPAPVYVGFGSMMTGKPEKFTALILKALRLTGRRAIVATGWGALKNLKPDQEGDIFFIDNAPHDWLFPRVSLAVHHGGAGTVAAATRAGLPQVIIPFLADQFFWSWRLKVIGISPIRLSRRTLTAERLAEAIGRATTRAPRDKAASLRPLIEAEQGVESAIDILEGWGLLRQETGTATLTTGISPR

SEQ ID NO: 7625 - protein, 424 aa, Chondromyces apiculatus
MNICLIGIGTRGDLQPLIALGKGLAARGHRVRVLAGAGFLRWIEGHGLEAVPAELNMETLMRSELGRTWADTGANPLVGVKMMRRLFAQQDEILAADLLRAADGAEVILSSITTVVHTASIAEASGALHVCLPLQPSPLATRHGPSALLAAAPHRDSALNLLLGKLLEETLWRISGAFANRLREERLGLPPLTRGEAMAMLRRTKMVHGCSAHVAPRAPDWPDVWEVCGYWFLDEGKGYEPPEALTRFLDAGEPPLCVGFGSMTTGDPAAVTRLLVDAVTRSGRRAILLSGWAGLGGVALPESILRLDSAPHDWLFPRVSAVVTHGGAGTVAACLRAGRPAVVVPHIADQPYWGRRVEELGLGPAPILRPRLNATRLAAALQATQDTAMQRRAEAMGEKIRAEDGVTVAVARIEQHMEAHRRGG

SEQ ID NO: 7626 - protein, 828 aa, Eutypa lata
MGTYPLQRAGLFANYLNQTGRRMSSLLATESMGYVEKVSGMWKGGRKHYHEQTGLKTDDELDYEDEDAQVASATDRFRAHFALPETERLQATYFGFLSRVLPLYGKIYISDRHFCFRSLLPGTRTKLILPLKDVENVHKEKGFRFGYSGLVVVIRGHEEIFFEFSQGDARDDCAVTLLQSIDTARYLRESMILDQGEQELADEAIAERDALQQARLQINPEHDIKLPQQAPSLSDSSPTILFDDPKASFLNFKPAQPMKVTCLTIGSRGDVQPYIALCKGLIAEGHKPRIATHLEFKSWIEGHGIEFAPVEGDPAELMRICIQNGTFTWAFLREANSKFRGWLDELLVSAWTACQGSDLLIESPSAMAGIHIAEALGIPYFRAFTMPWTRTRAYPHAFVMPEHKMGGAYNYFTYLMFDNLFWKATAGQINRWRNACLGLPNTSLEKLQPNKVPFLYNFSPSVVAPPLDYSDWIRVTGYWFLDEGTEWTPPDDLREFIEKARRDDKKLVYVGFGSIIVPDPAKMTQDVIDAVLRADVRCVLSKGWSDRLGDGQAASVPEVQLPPEIFQIKSAPHDWLFSQMDAAAHHGGSGTTGASMRAGIPTIVRPFFGDQFFFGARLEDLGVGICLRKWGAGAFARALWEATHSERMVLKAKVLGESIRKETGVDTAIQSIYRDLEYAKSLIKSKAGKNAAHANNASAASVNDQTPAAAAATISTDGGVSLNSEDDEEESWTFVGAGSGSSGDDPDLVNAAKNAAEIESSFLSGGSTGSFLDRSASSSGGGRNGRLASFGASTTTSSRLPPDRTNAGTGGSGNGSGSKPPAVVAAGS

SEQ ID NO: 7627 - protein, 1231 aa, Kluyveromyces marxianus
MPEESSPERSRSPSRFSKSMFIAPKAFVRKSLSPVDHIYHSVADLRFSSSNSETLESTLQAINKKMDSIDVSGGAVTGGGGGNEVSDDVAQPQCMAKSFAGFLATASMYAGMDELREEEEESNSSDEVELLNDAATTILDASSQADRTLFDFSIEMNQDALSQPSTASKSRKDLVREKLLKKFIPDEDEHYVEEFPCWLLRDIMIQGHIYLTNKHLFFFAFIPNFENDFHLSGSLQFVSGPSLGKSHRYWVVLKGRTLTFHGSSTDLYFPLLAIDIKDIQYAKISAREAHYAKFEIKVKNDVIELRADSFHSARHWVSSIKKQIFASQHSDTNTITVKIPLQNIVDLDENAILDQSGTLRIKALENTSGYAIDEYFFVFFQGSARKMKNKINSLLKDLELSGSQILIDFKKVESATDLSNSGKNADSKKNSSDLLVDSVEDTGSVMDNDMAASTAPLSAPISELPTSDTGHVSSAYPKRVKKRIKSMASSLRLTSPNKLERLEDDIIIEHYSPGIIHDPSVEVEVEPDKDSKSIISRLTPKKFQNIPTMWAADPVHFNVKNDAFFPLDDKYAADANDSEHSDKRFKFHFSFDNTVTLLASYHGYLNRNMPVYGKIYISDKNICFRSLLPGVNTKMVLPLEDIENCSKETGFRFGYFGLVIVIQGHEELFLEFSNKNARDDCEFVLMKTMDINGHTNTERKKNARLDSIHKISEAANLKLLEEKISEQGYDIPLIVEKNPYFTTTIKPNKSYKFGLLTIGSRGDVQPYIALAKGLMAEGHTVVLLTHLEFKDWIESYGIEFREISGNPAELISLMVQHGSMNVGLLRDASANFTGWIGSLLQSAWEGAQGIDILIESPSAMAGIHIAEALEIPYFRAFTMPWTRTRAYPHAFIVPDQKRGGSYNYFTHVLFENIFWKGISGKVNEWREKTLNLPKTNLFTMQQNRVPFLYNVSPTIYPPSIDFNEWIKVTGYWFLDEKLSYDPPPAFVSFLKKARELKKKIVYIGFGSIVVNDPQKMTDTIVDAVLEADVFCVLNKGWSNRFGDKDAKAIDKELPACIYNSGDVPHDWLFTQIDASVHHGGSGTTGASLRAGLPTIIKPFFGDQFFYASRIEDIGAGVALKKLNKTSLAKALTEVTTNTRIIRRAKHIGELISKEHGVETAISCIYSELGYARSLIKKKSETSSYENLASTEDFSTDHSDSDARRIPTEQEELSEPSTEESGASNDGSWLLV

SEQ ID NO: 7628 - protein, 405 aa, Streptomyces sp.
MRVVLTAWGSRGDVEPLAGLAVGLRELGAEVRVCVPADEEFAQLLDRAGVPLVPLGPTVRSIVTRPKPPGAAAAFQLAPELVAARFDTLTTAAEGSDVLLATGLMPSGARSVAEKLGVRYAFACFHPFGLPSKHFRPGARPGTPSPEEETDLEVLWEQDGQRVDQLYGEAENRHRAAIGLPPLAGVRDYALTSPALLAADPLLAPWKDLTNLELVQTGAWFLPDDRPLPHDLETFLDAGEPPVYVGFGSMAMHSSPDLPQVAVDAVRAHGRRVLLSRGWAGLASVDDRDDCFVLGEANHQALFRRVAAVVHHGGAGTTQTAARAGAPQVIVPQIVDQPRWAARVAELGIGAAHDGPTPTVESLSAALKTALTPETQDRARSVAARVRTDGAKVAAQLLLDGFPDA

SEQ ID NO: 7629 - protein, 1629 aa, Tetrapisispora blattae
MLHLQQAQQKIIIPPSASATVQSLLHPRSRSNSIDNNSKNSTLAADVSLASNITVKDSELIDLDTNNKPIPNVSTTQDSSSILRSRSKSPDSRFKKINKEALNLPLNSAKLVIKSVQRPASVVSEVPIGLTKGLSHVVGKTSSDILTIHEKIRSRTRSNSLNSKKSTLDSSILDSPTIGTTIEPGTSTTGQEDDLANSSSLMKGIVGLLTTASVYANMEKQKGFENLENDLALETDEETEEEEEQTIANPDDLSLNELHDDVLSPVTSSSIATIKPPMKIIDTSSTIEGTKSDDPNLNEEFVDASSEVSITNSNHTSSSSLSSEDNWKDARNNNLEHISSKQQKENSLVSNQLASNDINSLSKTSLEKEHVNPTLYQSQTQNNKNKSIENESISDINSNGSTGINRKPNLFSISIEPACDSLEDMASKGTSKTDTESNKGTLPKIIVGSANEDIPTQTLQRQLSKTESGISQLSPTNKLLEKFRETFNLSSDEKIIKNFSSWLLKDILIQGHMFVTKYHLLFFAFLPKSSGTVKLSGNLNVFSKIRGSSRYWCVLKDDIFTLYTSPTDLYFPAFTIDLRDVEDIQLMKNKKTKELTKKFHIITKSKKFKFIADSEYSAKTWYNTLKRQQFTCQNSENNSISIKIPLLNIIDISDQNIANEALTLSISVLESPKTYAVDDYIFVFLNGMGTNVKNALLLQLKQLGDLGVQVLYNDQERLQLLKDEAIELARDKERDRDDVISIISTFKNLNPLGGTISRVRSKSMSAMNIATTKPASPIKPSHLHLENQKAQTSNETLDTEGNTQEEPKDPIHYLNPQNNKVLKIVSPLLPSTEIENILTSASEKSYLHKIRPRSNSWFKKHDTSVEENINLTKLSTGHSTKLNTSGITPETSSKSTPAVLTDAPEAISLDQELVQSGIPSGSELSEIETPTSSKTADDTIVTTQGSRMSRISAPLKNLTGIWIARQLHYPNQYIKFDPNDKHLVKNEDEISDANNKFIEAFKLAKSEVLIASFYAYLNRSIPAYGRIMISQNFICFRSLLPGINMTMILPIDNINGTVEEKGFRFGYYGLVIVVQGNEELFFEVTSRAIRDDLNGLINKIREETQKTAKAHSSSYLINDFEADPEIAKLKLFEDKINASDGFDVPVMIDRSPYFNTNSRPNKSYKFGLLTIGSRGDVQPYIALARGLLKEGHEVIIITHKDFKEFVTSHSIGFEEIAGNPAELMALMVEHESINIGMLREASSKFRGWITELLDTSWEACKRNNLDILIESPSAMAGIHIAEAMQIPYYRAFTMPWTRTRAYPHAFIVPDQKRGGNYNYFTHVLFENIFWKGISGQINKWRVEKLKLEKTNLTLMQQNRVPFLYNVSPTIFPPAIDFSEWTKVTGYWFLDEKNEYEPPKPLVEFIRLARMRHKKLVYIGFGSIVVDNATEMTRAIVEAVKEADVFCILNKGWSDRLGDKSATTMDVELPNSIYNAGSVPHDWLFPQVDAAVHHGGSGTTGATLRAGLPTIIKPFFGDQYFYAMRVEEIGVGLSLKKLNSKSLSKALITVTTNKRMKAKAQLIQSQISKEDGVTTAINCIYGELEYARSLIFSKKRKSNGNEIKQTITAVTNAITTVVPDIRVEEPWTIL

SEQ ID NO: 7630 - protein, 893 aa, Elsinoe australis
MAHYLSHAGRGDVGKQMKKTEMRARADGRFDISFNHRIEAFFHHETHQNGSKTPESPPKGDEQDKSPAATRNMSKLRFRSTEMDYKPVVDTYQGIPRLNIAILIGGSRGDVQPFIALGKALQAPPYSHRVRIGTHAVFRDFVEEHGLEFFSIGGDPEKLMSYMVRNPGVMPTYDSMKAGDVSARRKEIGEMLEGAWRACTQAGNGIDPIEPFADDGDVEKGLDDLLRLPAPFVADAIIANPPSYAHIHIAEKLGIPLHLMFTMPWSPTSAFPHPLANIDASKVNASTANYLSYGRLEYLTWEGLADIINHFREKTLFLDPVHPAWGHQLFSDLKVPFTYCWSPALIPKPADWGDHINVSGFFFLSMASSYSPPPDLQAFLDAGDPPVYIGFGSIVVDDPARLTSIVLDAVRKLNVRVLLSKGWGKLGGDDVPENVFLLGNVPHDWLFPRCSAVVHHGGAGTSAIGIALGKPTVIVPFFGDQPWWAGMIARAGAGPVATPWKKLTAEILADNIEKALSPEMKSRAEELSRKIKHEDGVATAVETFHSMPQMQQLQCFLCPDRVAVWRIRRTNIRLSSMAAACLVLYGKLNPEKLKLLHHKRWLVEEGAQDPLIGLVATFGTLLFGYLGDIHHFKTNLGHKNDDAGTPGSTSGVLQASQTMIVSLAGHTFKAPFNLLYNLANGFHNAPRHLFRDRTVRIRNPITGAASGLKVGLESLGYGLFDAVTGLVTQPYHGYKAGVEKSRDSSALTPAAIGLGKGLAQGLGGLVFKAGAAALAVPGYCAKGLEREMENMMSGSEAITKESIAAMSRARQASFKRSSSAVEKQVDEEAAATMPLWELSTGSGASRYILLQRIWEGYRNIYEMKRKELDGAILLEEQIWTRWSQLRVSDEFVS

SEQ ID NO: 7631 - protein, 722 aa, Chaetomium globosum
MGVYPFRKANALIGYLDRHSRRMSTLLATESMGYVEKVSGMWKGGGKHYDEPHGLRTDEEDVGDDPEDRANSEARFQAHFALPETEKLHAAYFGHLMRVLPLYGKIYISDRHFCFRSLLPGTRTKLILPLRDIENVDKEKGFRFGYAGLVVVIRGHEELFFEFHRAEVRDDCTITILQSLEATHYLHDSTLMDGGADADDAQAAVAEHDALQKARGHRPRIATHGEFKGWIESHGIEFAFVGGDPGELMQLCIQNGTFSLAFFLEANAKMRDWLDELLRTAWEACQGSDLIIESPSAMAGIHIAEALGVPYFRAFTMPWTRTRAYPHAFIMPGQKMGGAYNYVTYVMFETVFWKATAHQINRWRRRYLGLPTTGLEKLQINKVPFLYNFSPYVVPPPLDYSDWIRVTGYWFLDEGNENYKPSKELADFIAAARRDGKKLVYVGFGSILVPDPAKLTQDVIDGVLKADVRCILSKGWSDRVLTKDKDKEKDQLDEKKTPEPELPPEIFQIQSAPHDWLFKQIDAAAHHGGSGTTGASLRAGIPTVIRPFFGDQYFFGARVEDLGVGICLKKWGATSFARALWEATHSERMILKAKALGEQIRKENGVDTAIKCIYRDLEYATQLIRTKTGKNQTRRKAAAASAGTATDGPGGSGGSGPDADLLDDDEEESWTFVGGDADTIDDLSVEAAMKRTVPDLGAVLGGEVPVVGGAPGVKGVKGAGLE

SEQ ID NO: 7632 - protein, 608 aa, Avena sativa
MADAEPTGGGGKGAEDIGGAAEAHSRDSPASAALPTAPSTSSSSADNGNLHRSSTMPGVIKDAEIITETTGPSNFERSKTERRRQNNDPAKQLLDDKISVRKKLKMLNRIATVRDDGTVVVDVPSSLDLAPLDVGGEDGYGDVTVEESLDGADIPSIPPMQIVILIVGTRGDVQPFVAIAKRLQDYGHRVRLATHANYKEFVLTAGLEFFPLGGDPKLLAEYMVKNKGFLPSGPSEIPIQRKQMKEIIFSLLPACKDPDPDTGIPFKVDAIIANPPAYGHTHVAEALKVPIHIFFTMPWTPTSEFPHPLSRVKTSAGYRLSYQIVDSMIWLGIRDMINEFRKKKLKLRPVTYLSGSQGSGSDIPHGYIWSPHLVPKPKDWGPKIDVVGFCFLDLASDYEPPEELVKWLEAGDKPIYVGFGSLPVQDPTKMTETIIQALEMTGQRGIINKGWGGLGTLAEPKDSIYVLDNCPHDWLFLQCKAVVHHGGAGTTAAGLKAACPTTIVPFFGDQQFWGDRVHARGVGPVPIPVEQFNLQKLVDAMKFMLEPEVKEKAVELAKAMESEDGVTGAVRAFLKHLPSSKEDENSPPPTPHGFLEFLGPVSKCLGCS

SEQ ID NO: 7633 - protein, 1449 aa, Blumeria graminis
MEPDEESNEELAHRLAKHHGAHQTNDIPERFQDGDDANEDCTALSAANSYMNQSVFGMIAAAGSQIDFNARFDAHSSDDNEEDTPRQSAEHQIDEMRANTVPTKSGKEKSSNFCRHIVHPSHKPVAKSKSGPPTIAVDNISLHEPTSLPVQIQSRTCTTQSMVMSRMLKARENMSLQPTTNPPHAVGENAESEKHEEESISNSLSKKLMEIFQFETPEQVIEEFPCWLMKSALLQGYMYITTKHISFYAYLPKRSNEVVKSGYLSKSGRRNPKYNRYWFRLKGDVLSYYIDPSDLYFPRGNIDLRYGISATLHTKENSKNATSLTLVTHQREYKFKADSSPSAKEWVKALQKIIFRSHNEGDSVKISIPIENIMDIEESHVIEFADTCKIRVVDNDDTYAVDEYFFSFFSFGKEALNLLRGIVEDTAAQHIPKELLKLSCHGKVDASEPLELTKRDQIPVSAEYVSKEPSSILTTTAPLLEDSVRATLSPLGVPNPVDNSLAGRCSLESHRKSIELKNLRRRSADIIRQKIDGNKKRSMSTGRKSMCENCIAGHIICDEQIDAGQPNIKEKEKVTEEVNVTEKQCLFDSYYHPLEEPSSTSLSNSDNTYASGSQILRGTDVFLTPTIQHATSEAGHCRKGKELELANLSSTKIHVNPHITAQKIHDNAELLEKPGSDRTEPLVSTQTLHSIVKVGAYPLQRAAGLAGYLNRHSKRMSNLLATESMGYVEKVSGMWKGGRKHYDDPRSLGPDDHFDDGEEDDVIYSSERFRKHFALPENEKLQATYFGFLNRVLPLYGKIYISDRSFCFRSLLPATSTKLILPLKDIENVDKEKGFRFGYSGLVIVIKAHEELFFEFSHSDTRDDCAITLLQNLETLRYLKQSGLLTLEEKERAEDAIAENKALQQARSRGHGYFGLESAQNIKCLQNVSPPVIFDDPRSSILDFKPPESLRITCLTIGSRGDVQPYIALCKGLIFEGHQPTIATHLEFKDWVESHGIKFKPVSGDPAELMRICIENGMFTYSFLKEASSKFRGWIDELLTSAWDACQSSDILIESPSAMGGIHIAEALGIPYFRAFTMPWTRTRAYPHAFAVPEHKMGGAYNYISYVMFDNVFWKAISGQVNRWRKKELGLHATNLEKMQPNKVPFLYNFSPAVVVPPLDYSDWIRVTGYWFLDEGTDWTPPKELTEFISKARKDGKKLVYIGFGSIIVQDSIALMNTITKSVEKADVRCILSRGWSDRLQKDTRKVEPPLPSSILKITSAPHDWLFRQIDAAAHHGGAGTTGASLRAGIPTIVKPFFGDQYFFGSRVEDLGVGIIIKKLNISVFSRALWLACNDERMIFKAKILGKTIRKEDGVSTAIQSIYRDLEYARSLIKLRDDKIDPDDIEDVEESWTFIGEDNDPDLVRRVQDWESMTMTGTSPWRERNEDDSDGSFIRKELEVVIGATVLAS

SEQ ID NO: 7634 - protein, 1396 aa, Aspergillus nidulans
MRPFIDDAKRRAERRLSASRQSISARRMFASSFPDRLKVDADDAQMDYTAPPSSNDSRDGMQYMQQSVMSLIAAVGSRTDLRARFDDSSDSEEETRTRPRFLSEKPFDQQITASPRADVTLHVPSAPETRSSSRERGRRHRRSISEHKLFRPFKAGSASQDKKQDASPDPGPSTSDRLSPIPVLPRPRSATPRAAPILSRMVEARALLETENPEENPQTLEEKEQGVSKKSQVSPLSRQLMEMFRFPTPEKVVVEYACSLLQSMLLQGYMYVTEGHICFYAYLPRQSTRVIKSGYIYKRGRKNPKYNRYWFSLKEDVLSYYADPSNLYFPSGQIDLRYGISASLTEPKDKSRESRDFQVTTDHRTYYFRADSSVNAKEWVRALQKVIFRTHNEGESIKVAFPIENILDVEESPMVEFAQTFKIRVVESEETYAIDEHYFTFFDPDSGRRAFDLLKGLISGTPTRSPPGLSPLPDHTAQPRRSRGSQNRWSLTSGSKSQVVSTRRQRSASTSILGSGTGNENSPQRQEDSSSSFFNSIDQVTESSAVLQSITDTTESASQILNRSDVFQSPTIHTWQQRTSGTARSNRRHSDEITRSTTEHGLDGISLARDGPEMQYTNSDSEQESKDASRLYSAVALNEIVKAGTYPLQRAAGLAGYLKSRSKEMSNLLATESMGYIEKVSGMWAGGRRHYGETDGLLPDDRALYPETAEESLRDRERFRAHFALPPTEKLEAAYFAYLHRALPLYGKIYISQNRLCFRSLLPGTRTKMILPLHDIENVEKEKGFQFGYHGLVVVIRGHEELFFEFNAADARDDCAVTLHQRLESAKFLVESISLSQQETDESEAAKVEHRMLQEARRNASAEQDLRPGLSESSELHSIFDDPRASIVNFKPAEPLKITCLTIGSRGDVQPYIALCKGLLAEGHKPKIATHAEFEPWVRKHGIDFAPVDGDPAELMRLCVENGMFTYSFLKEATAKFRGWIDDLLSSAWRACQDSDLLIESPSAMAGIHIAEALRIPYFRGFTMPWSRTRAYPHAFAVPESRLGGAYNYITYVMFENVFWRAIAGQVNRWRMKELGLRATNLDKMQPNKVPFLYNFSPSVVPPPLDFPDWVRITGYWFLSESSDWTPPRALAEFIQCARQDGKKIVYIGFGSIVVSDPSALTRTVVESVQKADVRCILSKGWSARLGDPTSTKVEIPLPPEIHQIQSAPHDWLFSQIDAAAHHGGAGTTGASLRAGVPTIIKPFFGDQFFFGNRVEDLGVGICMKKLNVSVFSRALWTATHDERMIVRAKQLGERIRSEDGVATAIQAIYRDLEYATTLTRQRSSISSTPFSPTPSTKTSDDQNANDDIADIEDWTFIGDESDLEFPRRARERAVSGADNIPERTILGSRSIYADS

SEQ ID NO: 7635 - protein, 803 aa, Fusarium fujikuroi
MSKSRSQSPSKGKEAQDTDNVLDIPWDAPPPYELHSSGSVLASTSRVNDYGKVDIEFSSLQPDEVNRLLPPDKAQEIEPSSSFSTAAPSGPCPALNVVIQVVGSRGDVQPFIALGVALQRYGHRVRLATHDTFTDFVRSSGLEFYPVGGDPEDLMAYMVKNPGLIPSMESLRGGDIGRKRVMIHDMLRGFWSSCVKPDPVSNRPFVADAIIANPPSFAHVHCAQALGIPLHMMFTMPWTATKSFPHPLANIQSQNMDPRASNYLSYGVVDLMTWQGLGDVINAWRVKDLHLDPLAAAVGPDIVGLMKVPYTYCWSPALVPKPSDWGESIDICGFFMRDEPAYTPPQDLADFLARGPPPVYIGFGSIVIDDPTALTNIIKESCRVAGARVIISRGWSKLGGNDPSTNSVFYLGDCPHEWLFKRVAAVVHHGGAGTTACGLVNGRPTTIVPFFGDQPFWGSVVASNGAGPSPIAYKSISVDKLSSAIKFCLSPEAQAAANRIATQMREESGVNTAVDSFHRHLPVANLTCDLIPHNAAKWQYIGRSKKGDKGHIRLSNAALKVLLDAKKAKLADFEPLRPKGYLVENERWDPVTAGASSVLGTMTDFTSALGGAFIDPFKDVKRVRPDGTRRSAGTATAVASGKALQGMTTAVVKGSLVDVPLAFAEGFRNTPRLYGEKVADYGPVTDWKSGGTVAAKNFGFGFYEGLTDIVTKPMKGAKEEGALGFFKGVGKGSLNMVAKPGSATFGLLAYPAQGIYKSIQSMKTNKARDAVTAGRVESLSDGEQGATSPDAPQVVKRFQELIG

SEQ ID NO: 7636 - protein, 418 aa, Unknown
  Description of Unknown: Mycobacterium sp. VKM Ac-1817D sequence
MSTIAIVAIGSRGDVAPLTGVGLRLQQAGHRVIMVAYQAFADLVTGCGLEFRGVADDLADAPADLADISPRQAAKAMAAFLSPRGMQVLGDRVLAAVRDDPVDLLLLSPFAELVGHPLADALAVPRIGVRLQPISATADHPPALLGAWTAGRYGNRVAARVSEALVDALYGKAVNHFRAQLGLPAADARSLRRRRTEAGWPILYGYSPAVLPRPADWRSGIEVVGYWWPARHADWHPPIELVRFLEAGPPPVVIGFGSTVNSLAAAEKMSAAVMQAVRTAGTRAVIQAGWAGLDAGGDDVITVGDVPHDWLFTRAAAVVHHCGAGTTAAGLRAGVPTVAVPAGYGDQPFWARRLFELGVSPQPLRQSHLDPKSLGVAIRTVLSNNRFRDNAEVLSTQIDAEDGAGQVVSTVEKVLSYR

SEQ ID NO: 7637 - protein, 1525 aa, Dentipellis fragilis
MASPWFSKPAQASPPLLLMSNRPPKSQSISPQSPPPLSRPLSPEAIVSDSERPVPPSSPRQIVRRVMERTSEKLGRSKSPGTKPSDLSRSEAVPAGRRFLTSRSKGKSRQNAPDVGSGDEYGIAQHRAQMSISQLSATSVRSEPNVESPFICPPSPSQHPTRPTLNSFQGETSMRAGTQTLIQALQALPWAEDQDNDDDVINHGGLSPAESDSEEEGKQVHGLSSSIHTIYRPVARSRRADSLYRLSPVRDGPEDQPNTQLFTDAAQRDFVSDEEIDDDFEIQTPGRTGSPTQLSLKEDDEHDVSTTPTIEPASLRRHPERIGSLATVKTVKLDRRARLAEKLAEIFELQGITEVVSEMPCWLLRSILLQGYMYLTNSYLCFFAHMPAREDQVLKSGTMYKKAQRTKRWIRHWFILKNDVLSWYQSSSDPYFPHGVVDLRYAISCDPSQEKDIRLRTNNKTIHLSAESVPSRDEWIKAIRKVIFKAQNMGDSVKIAIPYSTILDVERSHAMDFSETIEVKVVDGEEDLAVDSYFFAYFHDLPAALEQIRDAVAAARRFIPNDAATLPQELRIDTTLNPSSAFSRHINSERLPAVQESAPSRLAPFRLSTLLRPFQDSLPIGRTASAPDHLDDRNEDFVAVQKRADSSFIPTTTSPGALDGSVSDSLSPPSTASTLPLDQDSPTARNEITPTPTNLGHTYPPSTTTSVPELPVVPTRESTSSWNVGVPSWLKSVPSPRRVFGSSSSAPSGLDRMAIPADGKTVSEVYSSTLSTSTGKSSNGPNELGYSILETPGTSMDEDATEKFQSAFAFDDKERLLGYFPGYLFRMLPVYGRLYISKNHLSFKSSTPLASKTRMILPLRDVLSTETSKAFRFGHYGLVVIIKGHEELFFEFNQEDRRAAVVRLLENQMEDIRKHKVHSDASAPTKGQRDALVLEEFGPKIAAAEDTDPRPPPESLTDSVPAIMFTSTSSTFLTFKPKESLHFTFLTIGSRGDVQPYVALAKGLMADGHRVKIATHGEFQNWVESHGIEFGYVGGDPAELMRICVENGTFTVSFLREGLQKFRGWIDDLLKTSWEACQGTDVLIESPSAMAGYHIAEALRIPFFRAFTMTWTRTRAYPHAFAVPEHKMGGSYNYMTYVMFDQVFWRGTAGQINRWRRNTLRLPSTSLDKMEPHKIPFLYNFSPIVVPPPLDWPEWIRVTGYWFLNDADVSATKWTPPADLIEFIDTARKANKKVVYIGFGSIVVSDPKGMTRCVIDAIVRSGVHAILSKGWSDRLTKNASEASEPEEPLPKQIYQISSVPHDWLFQRIDAACHHGGAGTTGASLRAGIPTVIRPFFGDQFFWADRVEALGVGSGVRKLTVESLADALVAATTDTKQIYMAKFVGEHIRSENGVATAIEAIYRDMEYARSLIKRPTDDELSDELVEPEEATIREDDKPVSSPPSRPETRSGSSSAGGAASEDWSVVSDLDEPNSRPSRRASEGRDRAQSWRRSGITAAVLSMLPDTLTTGGHRRSRSTSSVSARNV

SEQ ID NO: 7638 - protein, 433 aa, Martelella mediterranea
MTPRKVLICTYGTRGDVEPFLALAHGLKEAGFDVALATSSRFRAFVESHGVAFFPMSDTSLAALESPDGKTMLEGDSGLLPRITAGIRLSRRSGAIQDGLMRETFAAAIDFPPDLIVFNAKLFAAPHVAEKLGVPAFLGMLQPMLVPTAAFPAMGLPNLPLPGYNRFTYVLVRKSIGSFRRRMNRFRHEVLDLPPVRNGSAVLFPPGAGNIGVLHAYSSGVLPRPRDWPESARVTGYWRLDDGRGYTPPPDLAAFLDRGEPPVFIGFGSMPSGDARALARLAAAALRKAGRRGVIAKGWAGLDVEGSDDIIAIPPVPYAWLFPRMAAVVHHGGAGTTAEGLHAGVPCVICPFFGDQRGWAQLSAALGVGVAPLPRRRLTEDSLAAAIAEAVTNTLLRDNAENLAARLRRENGVKTAVEIITQTLSDPRRGETV

SEQ ID NO: 7639 - protein, 865 aa, Cordyceps militaris
MFRTKSTEPGQLVLEQGPSGSVLDDGRFKIRFHSEAHSLASWYHDLQMKRSCKHPASRPTSPEAPKADPAGFPPLNIAIHIVGSRGDVQPFIPIAQILSAAPFNHRVRICTHPVFKDFVEEQGVEFFSIGGDPEALMSYMVRNPGLLPNRESVKAGDIGKRRDEMAEIINGCWRSCIEAGNGMGEPVTAAFVTDPKELFIADVIIANPPSMAHIHCAEKLGIPLHMVFTMPWSPTDAFAHPLAAMNYGGADKKMANYISFIMMELLTWQGLGDLISKFRHQKLGLDPISPLWGFHLLPRLRVPFTYLWSKSLIPKPKDWGNYINITGFSFLPLASSYTPPDDLTAFLAAGPAPIYIGFGSIVVKNPAELSKLLFAAVKKAGVRAIISKGWSKVGGDDVPDNIYLIGNCPHDWLFQHVSAVVHHGGAGTTAAGIAAGRPTVVVPFFGDQAFWGRMVARAGAGPEPVPFTEMTVDSLAKSITTALTDDVQKGAQEMAKTIAAENGAEDTVTDFLERLASEDKLQCDLCPGRLAIWLHKKTGARLSGFAAACLADKGIMTPDQAKLIHHKSWYVDEGAEHPLVGMVASATGFVTAVAIASSDYSKAWKYRPSKASAKKETASESSSERKGAVPEDKPPANGAAHIMTPSQMEISAKKMATKSLRTVWTPQPRIERTPTFHDNCKAEWEGHERGRHGRTWYLARKTSRFGVELTKAGLKAPVAFFWNTANGFHNFPSYGYAGIEVRRRDEVKGFGSGVKVAGKEFVLGFWDAFSGIVVLPYKGTRDEGAKGLGKGIWRGGKGFFCGLGAAVFGLPGYTLKGFERELSKRHLTKLKAEILLIRLRKSLQDFREATVEEREAVIDAWMAKY

SEQ ID NO: 7640 - protein, 1166 aa, Schizophyllum commune
MATVRVQRRNRLASKLKEVFELEGIDEVVAEMPCWLLRSVLLQGYMYLTNSYLCFFAHMPSREDQVLKSGLLHKKSQRTKRWIKHWFVLKNDALSWFNSSSDPYFPHGIVDLRYAISCEPVGEKEFRVRTNQKVVHLQADSVPSRDEWVKAVRKVIFKAQNMGDSVKIAIPYSAILDVEKSSAMDFSETIEVKVVDKDDSYSVDSYFFAYFHDLPAALDQIRDAVRVYRSLPEPPSPYSVMDTTAGTRTPVAPQAMDRAVSAPASDTASRTLSAFRLPSLFRTVPSTPEKANFSSPDVTDNEEFTHISRRPNSFVPITASPKQMTSSELPSEAATPTQSTIEHTYPPSTSSSSTQPDSSLHSATSGGSGWTVGVPSWLKGRPRLLGGGIPRVKEMYTPPTTTPSAGSGSSMGDMAFSVLETPEATLDVETTEKFRAAFAYDEKEMLLGYFPGFLFRLLPINGRLYISTNFFCFKSSGPLATRTRVSIRLLTYLQMAIPIRDILATEKSKGTRFGHHGVIVIIKGHEELFFEFWGEDKRDSFMRLLGKQMEDVHRRLASGESNNVPSQGNRDALILEEFEPPSADDPDAPAPDTSMTDSLPAVMFTSASSTFLTFKPNKSMHFTCLTIGSRGDVQPYIALAKGLMADGHRVRIATHVEFKDWIESHGIEYGYVGGDPAELMRICVENGMFTVSFLKEGLQKFRGWLDDLLKTSWDACQGTDVLIESPSAMGGLHIAEALRIPYFRAFTMTWTRTRAYPHAFAVPERKMGGGYNYMSYVMFDQVFWRAIAGQVNRWRRKSLNLDSTNLDRMEPHKIPFLYNFSPTVVPPPLDWPEWIRITGYWFLDDADASGKKWSPPDSLNKFIHKARKEHKKIVYIGFGSIVVSDPKAMTRCVIEAVVNSGVRAILSKGWSDRLSVKTTEASDIEEPLPSSIYPIASIPHDWLFQRIDAACHHGGAGTTGASLRAGIPTIIHPFFGDQFFWADRVEALGVGSGVRRLTVESLTDALRAATTDVKQIEKAKAVGEKIRSEDGVATAIESIYRDLEYARSLIKAPPSQPRPLPPHDDSDEDLVLENSTIRDSVTTNNSEHNSGYNSSSGGGAPSEDWSMVSADGEERRPSTSGSRPPVQRRCSSTDRIVNKRNSIAAAMLAVLPDSLASPRRAASPGA

SEQ ID NO: 7641 - protein, 1495 aa, Phialophora americana
MSNHDSPTSKKGGLVRRLSKRPHNLNRLPSSHIPSRLRLGDDAQDDVTAPNRGRNVPASYMNQSIFSMIAAAGSRTDFNTRFDESSDSEEEIPEEEQEQTVGDDTSQPVAVDVRGKVATTDGRPTSDSKIKRLSSHHLVQSLPRLSVRSTKKKEKGVAQQEQSPESDVTSKSSRSNPREAPVLSRLITAEAAFQESAEADEQPTDSPDVHKSRSRGESTPQTLLATRLMEIFGFESPETVVAEYPCWLLQSVLLQGFLYITKQHICFYAYLPRKSNTVARTGYLSKKGRTNSKYKRYWFSLKGDVLSYYSDASNLYFPSGNIDLRYGISAALSTDKEKSKQKECKEFSVTTDHRTYHFRADTATSAKEWVQSLQKTIFRSHNDGDSVKISLPVDNIIDFEESPVVEFAETVKIRVIESEDSYAIDEYFFSFFSFGQDALNVLGSLLTEAPGRRESDDILSPARKADPLSSPRSRPTPIRQSSDISTGSARAQSSPPLKDSVRATLLPYTIGDNGRMSPRMSGEFARGNSPSRSSNDFTGEYGRASFERGRRSGSTSRLEINKSKRSGRSPLARHHDSEDSYVQSIDKETDSSTAPLSPRAEAQMSASQILTRSDVFHTPAIHRMDTLASMSTEPSRKSSDAGTMRSGSPQRGQISPIPSRPLPDHQQGRRPTVQTEALLLTEMQSDQKMLRNDSSPTLQDLVKAGSYPLQRAGAFADYLKNRSSSMRKLLATESMSYLEKVSGMWAGNRKHYGENEGVVSEDRGVDPEDEEANVGHGDRFRAHFALPATEKLQATYFGFLHRVLPLYGKIYISNRKFCFRSLLPGTRTKLVLPLRDIENVDKEKGFRFGYHGLVLVIRGHEELFFEFSSAEHRDDCTVTLLHSLETARYMAESGVLASHDDDDAEIAKEEHRKLQEARRSSAAGGEHALVLPDTAEAIYSHKHEESSPSPSRASGRLLFDIDPRASILNLSKPTSSLRVTCLTIGSRGDVQPYIALCKGLLAEGHQPRIATHAEFEPWIRKHGIDFRPVDGDPAELMRICVENGMFTYSFLREASTKFRTWIDELLTSAWSACQDSDLLIESPSAMAGIHIAEALGIPYFRAFTMPWTRTRAYPHAFAVPEHKIGGAYNYYSYVMFDNVFWKAIAGQVNRWRKKELGLRSTNLDKMQPNKVPFLYNFSPMVVPPPLDYSDWVRVTGYWFLDEASDWTPPADLTNFIKKAREDGKKLVYIGFGSIVVSDPAALTKTVVDSVLKADVRCILSKGWSDRLGNPDAVKAEVPLPEDIIQIKSAPHDWLFRQIDAACHHGGAGTTGASLRAGLPTVVKPFFGDQFFFGSRVEDLGVGICLKKVNVSLFSRALWEATHSERMIVKARLLGETIRKENGVQTAIRAIYRDLEYAKSLVKARAAIQQQGAVTAAGAAGLTAVDLLDEGGDIEESWTFIGDASDPELQRRIQEWDTTGSGATTVRGRAPRVSIDLAKLGAMQDVEPVRKGSVKR

SEQ ID NO: 7642 - protein, 1269 aa, Lachancea thermotolerans
MPGEKPDTDEISEVEQRPATVVESPKRRWRRSMPPVGRMYQSFTSFASSNRNSSDGGSSNPVFSDEDSSGPHGGEDKDQEHDLAIPCGMAKSIVGLLTTASVYAGMGDIEQAESICEGEESDASDDSGPTDRSEAFERSEPSKNPGTPEVNKDDEVEGPASSSPSDVTVGADENSEANDSNPISETPSQISKKDTLFEISVVPNSDLQSIMTSSSNSRQSKIYRKLISKFGLNEDEDQFVLTCPCWLLKDLLIQGHTVLTTRHLLFFAFLPKSTGATKMSGNLSTVSGRLRGRWTRHWAVLKDHTLSFYNSPKDLYFPILTIDLRYATKVELSKHNGEATGDFRIFTEGKTFKFRADSNYAARSWCSALKKQVFATQNSENDSMSVKIPLANIIDMDEQLVVAQSVTLRIRVLESSQSFAVDDYFFMFLNKKDLKLKETINTLLLELDRVSPEELGSTTIANETGESPLVDEDTQKGSHPERRGRSRSTSKKLFKRVLSPMSRSPGHSLSMSISIPFSTKSSHTGKGRLRAVTDGFSRKLPTGNVEEHVSVKHPADIEVEPSNEDQEVVPKETAANESVPDPADEGKGRNFRLASWTPKPIKNMGNMWNAHPVHYETEGPDMFPGDDPYLTTPKEQSIAAKRFRSHFSLDGTESLHAAYYTYLNKNIPVYGKLYLGASVVCFRSLIPGTKTKMILPIKDVENCYKERGFRFGYFGLVLVIHGHEELFFEFSLQSSRDDAEFAMLKLLDAVKPRLDGVSAAKTNVKNGNTESSSGRNKQLTEAAKLRMLEDKINAEGYDLPMMIEENPYFKTSITPKKSYKFGLLTIGSRGDVQPYIALGKGLVREGHHVTIITHAEFGEWIESYGLGFIEIAGNPAALMSLMVQHGSMNVGLLRDASSQFRGWIKDLLDTSWSACQGLDILIESPSAMAGIHIAEALKIPYFRAFTMPWTRTRSYPHAFIVPDQKRGGNYNYFTHVLFENILWKGIGGQVNKWRVEKLGLEKTNLYMMQQNKVPFLYNISPSIFPPSVDFSEWVKVTGYWFLDSKDDYDPPVELVKFIEKARASNKKLVYIGFGSIVINDPKEMTRAVVDAILDADVFCILNKGWSDRLDNDIKKNAEQEVFPDCIYNSGSVPHDWLFPKVDAAVHHGGSGTTGATLRAGLPTVIKPFFGDQFFFAGRIEDIGAGISLKKLNSKSLSRALKEVTTNSRIINKAKQIQQEISKEDGVSVAISCIYAELAYARSLVVAKAKGTQSDAKDPSSPEENTWFLV

SEQ ID NO: 7643 - protein, 1519 aa, Sphaerulina musiva
MASSGKQHDIAASQPALLPIRSGARATSSIKNISSRVRSSLPRRRLSMDLPERLRFDEAEEEDVDDGTGVKDGFPARSMYGMLAAAQSRPNFKKQFTQQESASDSEGEDDKHKRRSVDQRRPSKEISRDADKGRKPSEEGRTSPRPEESSKRHKARLSVNRLARSVLSKHELKPTTKQTESQEQDAMTSSQILPPRVQETTSEARATFVRPDATVLDRKLKAMAQAELDASTSTLTSRKSREEGKAFGEVESDKTNHSLAHVIADIFQFAEPEEVTSEFQCWYLQNVLLQGFMYITTKHVCFYAYLQKKTTKTVKSGHLGKLGKHSYRYRRYWFVLRGDSFSYYNSSAEPYFPNNVVDLRYAISAELAAVPGKEETASDFTITTPSRVYQYRADMVSSAKDWVKQLQKVIFRTHNDGDSVKISLPIDSIMDVERTGVVDFAETIKLRVVDNEETFAIDEYFFTFFHHGEDAVKALIALAAGNGAKKLRIEGAISPLSKHRSPAGRKMSSAEQSPRLSTIKSTLLPASAAERSVSRSSGERRRLERRASSDHGVDVSDRGRTSASAQGRDSRNASKSPMSPSIHASSESFVTSSEPPDSSVDGDAMDADMSASQMLSDDHVFRGPTLRTSQARRTAAGQPAGRPRQVSRASSRDSSGERDSIARVQAPSWPATYRSMGNQRPTPQRTESGDSARTAEPDDRPRPEPSGPKLIRGISTPLQHAMNVAGAVRAGSKRVGSYLSSSPKTYITNWTEAMAGGKRHYTDIEGLAHDEGVREPERHLDYAEHERRFQEHFGLPPTEKLVSVFYCWLHKTVPLWGKIYMGTRRLCFRSLYYGTSTKLIIPYKDILNVQKQRGFRWGYPGMVLVIRGYEELFFDFQDTGLRDDCVVSTLRTVEVVEAAAESMILTEVEQQDASEAAAENALLRAARQTGHDDEEGISLPEEVDALPVIFDDPSASVLEFRPKKSLNITCLTIGSRGDVQPYIALCKGLLAEGHKPTIATHAEFRGWVEKHGIAFKEVDGDPAELMRICVENGMFTPSFFLEANSKFRSWLDELLVSSWAACQGADLIIESPSAMSGIHIAEALEVPYFRAFTMPWTRTRAYPHAFAVPSQKRGGGYNYMTYIFFDNMFFAAIAGQINRWRGKTLKLGPTSLDRLQQNKVPFLYNFSPSVVPQPLDFSDWIKVTGYWFLDEGEDYVPPAELAAFIKKARDDEQKLVYIGFGSVTVSDSRQLMQQIVDAVVKADVRCILSKGWSDRFETAVAASQPALVLPSCMYEIRAAPHDWLFKQVDAVVHHGGAGTTGASLRCGVPTIIKPFFGDQFFFATRVEDLGVGQHLKKVTGNQLGRALWYATHDERMRSKARLLGEAIRSEKGVDTAIKAIYRDMEYAKSLIKKKKQQQAHGATTSTSSDGANASIDLSEDTEENWTFVEMEGEAAAAAAAAAAAAAETEAFGALAAELGGGGAESCLPRSSSKALHGQRSHSSSFRSSSSSSSSSSSAAAIASGQHSRAGGVAVRGGRS

SEQ ID NO: 7644 - protein, 737 aa, Colletotrichum incanum
MSVIESKRSRRTDDEDSESLCETPPPYELHSSGAFNPVKRRYQVGLSACADGNLTISFQSDRPQQLAEQLPPFPTTEDTTLARINVKTVPSLNIVIQVVGSRGDVQPFIALGTSLRRYGHRLEFFPIGGDPADLMSYMARNPGLVPSVESLKGGDVGRKRRMMREVLHGCWRSCINPDPVGNQPFVADAIIANPPSFAHIHCAQAFGVPVHIMFTMPWTATRAFPHPLANIQRLGDVINSWRRRDLALAPIPASMGPGITTFLKIPHTYCWSPAVVPKPADWGPEIDVCGFFIRDKPAYEPPADLDAFLSAGPPPVYVGFGSIVVNHSTRLVGIVLEAASICGVCLLILRGWSKLDEGRPNTDDVFYLGDCPHEWLFKRALAVVHHGGAGTTACGLINARPTIVVPFFGDQPFWGRVVAKAGAGPAPIPQKELDVGIMVEAIRFCLSPAANHAVQAVAQTMRQEQGVDTAVVSFHRSIPVNVMCCDILPDQPAGWTRQELKSADLKVLRTKEYDTDVKRWDPITGGASSFLGTVTDFTFVLGGTFIDPWKEYKRARISAQEAGRASGAAAMAVGKGFASMTGAIAKGGLVDLPLAVAEGLHNVPRLYGDRPREHGKVEDWKSGGIAAAKTFGTGFYDGLTGIFTDPYKGAKEGEALGLAKGVATGSVGFVIKPGAALFGLVAYPAQGIHKSLKARIGRSHAVWTAKSALLDHDQRQHSGIPRGGSKVLQVFDAYFTQ

SEQ ID NO: 7645 - protein, 690 aa, Citrus unshiu
MRSNGFDHPLKDVDKEEGVGGSKTLNKDLGQTDGIDEPMNKYNARAFQSLEKQKTNSLEQSPVVGISLSKKEDVHSSPRASLDHCITAPITRRDSLTDMNEFRYSRSMTEKKSMPRHDLKLDRLSDREKKKLIVELVRIQNDGTVEVDLDKSAPVASEFLEFQPVEGPPIILDDTSFSDSKKSIPRLNIAILVVGTRGDEFGHRVRLATHANFRTFVRSAGVDFFPLGGDPRVLAGYMARNKGLIPSGPGEISIQRKQIKAIIESLLPACTDPDIETGVPFRSQAIIANPPAYGHAHVAEALGVPIHIFFTMPWTPTYEFPHPLARVPQSAGYWLSYIIVDLLIWWGIRSYINDFRKRKLKLPPIAYFSTYHGSISHLPTAYMWSPHLVPKPSDWGSLVDVVGYCLLNLGSKYQPQENFVQWIQRGPEPIYIGFGSMFLVIVGGHQANKLHFDDLVGGFHIPVRPLEDPKKTTEIILEALRDTGQRGIIDRGWGDLGKITEVPDNIFLLEDCPHDWLFPQCSAVVHHGGAGTTATGLKAGCPTTVVPFFGDQFFWGDRVQQKGLGPAPIPISQLTVENLSNAVRFMLQPEVILELAFLFQNLKSDTHQRLQRFWFLTGLWLSQVKSRAMELAKLIENEDGVAAAVDAFHRHLPDEIPMPSALPEKDDGPDPLQWFFIQIGNWCCQRCGGV

SEQ ID NO: 7646 - protein, 867 aa, Aureobasidium melanogenum
MKATSANHSTLDHEDPSPPYESVAPNVPDALSVGMRNDGRMDMDIDEALGRQLTTLVQEEETTSSPHRGALSIRETIPIVKCPAKLDICIQVVGSRGDVQPFVALACELHQQHGHRVRIATHAVFEDFVRESGLEFYPIGGDPAELMAYIVKNPGLIPSVASLRAGDIGRKRRMLAEILEGCWSSCYKPDEKTQRPFVADAIIANPPSFGHVHCAQALGIPLHIMFTMPWTSTRAFAHPLANLKYSPDTSPRVANMMSYGVVEWMTWQGIGDLINDWRTRILDLEPLPSSEGPLLLETLNIPHTYCWSPALVPRPSDWPEHIDVSGFFFRETPPYRPPPDLRQFLEAGSQPIYIGFGSIVIQDSEALTKMILEAVRMTGVRALISRGWSNLGQDRKSDDTVFFVDDCPHEWLFDHVAAVIHHGGAGTTACGLSKGVPSFLVPFFGDQPFWGTMVAASGAGPEPAPHQSLSALVLARGITTCLLPGTKQAAMEVAGKMSTEAGVHAAVQSFHAQLRVDLKCDVIKDEPAAWKYQDGSNLIKLSKRAAAILTRQAMLNPKNLTHYASKPIIIDAKRWEPVSAVVSASLHTAGSIGRAAAGVVLEPYRLYKSTKARSDLSDAHAGPSRATQRAENETQPSAEQADTVSSDKKKVPSTHLTATAPRKNEDQRAIMSDSSDSTNRTREIMKVSAKNAGKFFFSPIKGIVLDIPLAAVEGMWALPRLHDDNGYQHTAVKDWKSGGSVAAKSFVHGIHEGMTDIFIKTYAGKKNEGAKGVAKGLSMGFVNLTMKTGAGALGLIAYPCQGVYKSIHAAMHTKARNAVEQAKLDEGEWLMNNQPMADVEIQDVVQRFLHATPVKGNGKSKVGVWGR

SEQ ID NO: 7647 - protein, 726 aa, Fusarium fujikuroi
MFATESLGYVEKVHGMWKGEHRHYDEPQELKTDDDGDDIDSDAEDKTQTAMDRFRAHFTLPESEKLIATYFGAIFKVLPLYGKFYISDRSFCFRSLYPGTRTKLILPLKDIENVHKEKGFRFGYYGLTVVIRGHEELFFEFRRPGLRDDCAVTLHQLMETNRFLEKSGFLDQEEQDDEEAAAAIAERDALKAARQDEFVNHELELPRETSGVSNAPTILFDNPNSSGLAFKPQKSMKITCLTIGSRGDVQPYIALCKGLIAEGHKPRIATHAEFQGWIESHGIEFARVEGDPGELMRLCIENGTFTWAFLREANSTFRGWLDELLDSAYTACEGSELLIESPSAMAGIHIAEKLGIPYFRAFTMPWTRTRAYPHAFIMPEHKMGGAYNYMTYVMFDNIFWKATAYQVNRWRRKTLGLPSTNLEKMQPNKVPFLYNFSPSVVAPPLDFSDWIRVTGYWFLNEGGDWEPPQELQDFIAKARADGKKLVYVGFGSIIVKDPAKMTQEVIDAVLKADVRCILSKGWSDRISPKDDPSKPRPEEPEMPPEIHVIKSAPHDWLFSQIDAAAHHGGSGTTGASLRAGIPTIIRPFFGDQFFFATRVEDLGVGVWVKKWGTNSFGRALWEVTRNERMIVKARVLGEQIRSESGVDSAIQCIYRDLEYAKSLIKRNAGKAAQHDANEDEDTEESWTFVGRDEPDPDAVTKKLSEGLVDTEKPLSLGSQAPSTATA

SEQ ID NO: 7648 - protein, 1771 aa, Wallemia mellicola
MRYTAILLEKSAAQKLLRDAIREESKSSTERKAFRLSDHDSELHSANAWDGDEHPQDTSLRMLLDAKKPLRSGNKGLYGESRLKTIQKPTHTDNLIPSDPSYQTWDATYVAPSHASGSQRPAIYRARNTAEIQALQKVQSMDLDSRTKAHIRNTKKSKAKVRRISNAREGALDYSLTGSLDDVEKTEYTKARPQNIQAWNSHIEDQIQVAQRNGKFSNLPGRGKPLASLNEENAFISRDEQILNRLISRQGAVPPFVEMQMSVERETTSFRNYLREEIVKRALVDLPNYSSDDVVCSYRDQVWEDRNVSYHNILIDRVNSIIKSYNAIAPAFSRRGLLLLETEMKNAREEALPVIINRLRHPRATSKPAKQDKKPSTLIGRIHEQQKSTEESNETESKTNKSEENVEDVVNTSNSAADSNKEYSQSTPPNEILTQQGTTSAFLTPPNSWRGDVNMRMGTQSLIQVIQAFAHHADDDSNDDDEDAQEDTQDHRVFDMYSSLNTVHNKPQTHLHESMSTSMSGTPHESQDEDEEAGSDRSAHSDDSELTRMRSQSLKKKSTQRRRNLSKKLSEIFDLDGQEDIKAEYRCSLLGSSYRPLLEGFLYSTNSFLCFFAHVPTLERNNVVKTGPIGKRTLRTRRVIRYWLALKDDVLSWFGSAIDPYFPVGNVALRYAIRCVTVKNSDREFTIFTSERKFTFLADSKTGRNEWVKVIRKGMFRSQNESGSFKLVIPYDHVINVERSSNLEFADSISVSFINNEDGADCYYFDHFRDSVAESDDEFEEVGSDFSVLEHSAGMEDILKVEEEVQRKFNEYFALPGEKILGHFNCALSFQIWSRTKMILPLSDLQAVQPHKPLRFSFHGLIMIIHRHEELFLEFTTSNRRDACEKLLNTQLDKIFRSASIQQTQSSKGLQEAQIIEDLSLSYRHPSLTAPVLGEEGVSPSTGDVQPYIALCKGLIKEGHHCRIATHLEYKDWIENYGIEHREVGGDPAELMQICVEHGTFTLSFLREGLFKFRSWLDDLLKCSWEACQGSDLLIESPSAMAGIHIAEALQIPYFRAFTMTWTRTRAYPHAFAVPESRMGGSYNWMTYTLFDQVFWRAISGQVNRWRRSTLGLTGTNLQRLAQHKVPFLYCISPTLVPKPLDWNEWIHVTGYWFLDSITPENSENSENSVNDNNGKWDAPAGLLEFIAQGRSLNKKIVYIGFGSIVVSDPDEMTKCVVEAISQADVYAVLSKGWSDRMHTGKKEEKLLFPPSIFSIDTIDHAKLFPMIDAAVHHGGSGTTGASLRAGLPTVIKPFFGDQFFNADRVEATGVGSSVRKLTVETLSKALKTATTDEKQIANAKTVGEKIRNENGVANAIECLYRYMDYASTVITTRAHENLQHDDGIDAQDIEDDDDWSLPSETFSEDEAQRSMGVLSLATNIDLVTAIQIRSGVKIDCCSAATGLTCPEKNPCCSEFGHCGDTVAHCRGGCDPRVSAPNACSNVPICEDLEIKAFDRTAWSRVTQKPEDYDGEADQYDFTLDKGDITREENMLTMIMDEDNKGTRLSSTRYMLYGEFNARMRVTGTNGVISTMILMSDIHDEVDWEFVGAKTGEGQSNYYYQGVTDYTNGDTHKFPTGGQFHDFGFNWQEDKLEWKIDGQVVRTLRKDDTVGWDKKAHYPESPSRLQFSVWPSGIEDVSPGSFEWGGGKIDWSKGPFKATIQSISIKCGQSSEVPIGPDDISWEYNNQTSSQIAFQASPEPYKASSGGSSLHVSSPFTLMLSLSFALLYLVI

SEQ ID NO: 7649 - protein, 1314 aa, Pyronema omphalodes
MLSDDDLDHGRGASVRTQRSQRSHRHPYAGTQSMMLPRRPSIGDASDEDQSDAAAISSKTPYNMNQSLYQLIQQTAAVGLRGGNWRNSHRGRGDSEEEEGGEDGGDGDKGKGKERAASTKPTKAWGSALNRIEEKEMQDIEERGWQKHGPAPYMSQVLEHQKSEFQTAQNSRSDIRDAPERTMDLAKKVMEIFSLPQEEKVEAEYPCMLMSLDSIFLQGHLYITAYHICFYAYLPKRTNVNLKTGYLSKRGKSNVKFTRYWFELKGHVLTYFADPSERYFLNGHIDLRYGIQASLVDGGKDGKESKDPTAFIVTTDQRKLYFRADTVTSAKEWVKAIQKAIFRTRNEGDSVKICIPTSSVMAVEDIPLPGAQKTIRLNVVDSDDTYTIDDYYFGFNEYGTTALRVLQSAVEGSAASRLPDYLRDSTGSMGSCMSRDTSQRENVRATLSPRSPSGSARGSPRVSGEYTRSSFDPTRRNDFGGPLKRKQGHNRVFSNDSTELSYEEAESSRTTDDEDHSQSGSQILSGSDLFHSPTMKLNRLSLSRKKDKQKATPQDKDTSPSATIRIQPPTRQHTHHGDQDSGSEPNSPVGANKTTGIYPIAKATEWAGWMKRRSVKVGSILTSQPMGYLEKVTDMLSGGKTHQQPMGMMPHEKVDDEEQGEGELSPEDHSQRFRNTFAMPENERLCAVYYGYLHRTVPLYGKIYLSERNFCFRCVYPGIKTKMILPLKDIESVKRNKGFRFGYSGMIITIRGHEEIFFEFGQANARNECTNIMMDNLDQLRHMAESGFLSRGEYEDAESAKKEHQMLQEAHGYDNMTNSGYSTASKTSNSPVIFDDTHGSIIDFQPEPMKITCLTIGSRGDVQPFIALCLGLKKDGHSVKIATHAEFRNFVESHGIEFAEVAGDPAELMQLCVEHGMFTPEFLRQTHTTMRSWLDKLLETSWEAVQGSDLLIESPSCMGGVHIAEALHIPYFRAFTMPWTRTRAYPHAFAVPERKMGGAFNYLTYTVIERVFWGATAGQINRWRKNMLGLRSTDLSKMQLSKVPFLYNFSPNVVPPPIDYPDWVRVTGYWFLDNEPGFIPDSELMAFINKARFDGKKIVYVGFGSVTVEDPVAMTRTIVESVHAAGVRCILSKGWSERGKPAGSAPTPHTTEAPADKTAVKDPYSLGPEIFQIVSCPHDWLFKQVDAAVHHGGAGTTGASLRAGLPTIIKPFFGDQFFYATRVEDLGVGVSLRKLNTTVFTKALVEVTTSERIINRAAVLGEKIRAEDGVATAIKHIYRDMDYAHSLVKDKKPDLANELAESDESWTFVGNEQE

SEQ ID NO: 7650 - protein, 1343 aa, Penicillium oxalicum
MKSSPTRRLHSDQWPDRFKDGDDAQVDYTAPPRNMRSKDGHMQYMQQSLFSVLAAVGSRSDFRGRFDDSSGSDGDLEDDKAETRLNLNSGKKATVGGHQAVDPADWKPPGQHGERGRRHQRTKSDNKALRRNPAIENQDTSDDPLAASGATLRIPTRRARSATPRAAPILARMIQAQQTFDSASESKQLPSRSELPNDDSHEPPSSALSSRLMEMFGFEKPEKVLVEYACALLQNMLLQGYMYVTEGHICFYAYLPKKSSSAMKSGFLSKCGRKNPKYNRYWFVLKGDVLTYYANPSNLYFPSGHIDLRYGISASLADIKGQSSEPTDFHVTTDQRTYHLRAESATSAKEWVKSLQQVIFRSRNEGDSVKISFPVDSVIDMEESPMAEFAETFKIRVLDNNETYAIDEYFFTFFNSGQEAFNYLKSLVGSSPMKSLSDGSPHRGNSRHSSQVGVLGKATPAPDSPQGATPIDHQPSQVSSFEPHSEPRDSVDSLDFSTNQGTESLPIFQSLTETNESASQILNRSDVFQSPTMHSLPRRQSDTGDPNRRRGMARQESSGLSGFNTDTDDSRGNQGRADRETGSSPQHALGMPLDKTSKAVPQPVKRAAGIAEYLKSRSKQMSSLLATESMGYIEKVSGMWAGGQKHYDETEEVLSNDPSLDKEDKENGLKHGDRFRAHFGLPSTEHLQATYYAYLTRVLPLYGKIYLSERKICFRSLLPGTRTKMVLPLKDVENVEKEKGFRFGYHGLVVIVRGHEELFFEFNTTDARDDCAVTLHKNLESARYLAESGILAEKERNLTEAAKAEHRRLQEARLENPDEEDTETARNESESEVSPFFDDPLASIINFKPTESLRITCLTIGSRGDVQPYIALCKGLLAEGHKPKIATHAEFEPWIRSHGIDFALVDGDPAELMRICVENGMFTYSFLREATSKFRGWIDDLLSSSWASCQGSDVLIESPSAMAGIHIAEALRIPYFRGFTMPWSRTRAYPHAFAVPETRMGGAYNYITYVMFDTIFWKAIAGQVNRWRNNELGLKATTLDKMQQNKVPFLYNYSPSVVPPPLDYPDWIRITGYWFLNEGSDWTPPTELSAFIERARTDGKKLVYIGFGSIVVSDPAALTRTVIESVQKADVRCILSKGWSDRLGDPSSQKVEIPLPSDIYQIHSAPHDWLFSQIDAAAHHGGAGTTGASLRAGIPTIIKPFFGDQFFFGSRVEDLGVGICMKKLNVSVFARALWEATHSERMIIKARDLGVQIRNENGVATAIQSLYRDMEYAKTLARQRSIASSTPFSPTPSAQASPDHADADVDDIEEWTFVGDEAEMEMTKRMRELNLTDREKTLSEIIH

SEQ ID NO: 7651 - protein, 1445 aa, Pyrenophora teres
MASQDRGRDKISRRTSRKMKESRRESRGMSLDMPERFKDGDDAQEDVAAPKRSNTVSMNQSLFSMIARAGQQSQVDLATMQEADSGESDDDGKPKTAFRGLEGAARLSRLSSANNFQPPAEDTNEGTVDKRKHRRTLSENKLLRSLPKLKLSSRKETRDGQRSDQMSSSQFLPPKPSSTELSTPPSDQSPKTDVKEKPTTGEEIRSEKGKSSGRKSRHGSSAGLAKSKTTVTLAQRVQQIFEFEEVEEVISEYACWLLQSILLQGYMYITQKHICFYAYIPKKHHDVSKTGYLSKRGRSKFNRYWFVLRGDVLAYYTNPAEVYFPRNRINLQYAVSAEVIESTKKGEEETSFAITTDERRYLFKADSVASAKEWTKSIQKVIFRTHNEGNSVKISLPIQNVLEIEESSILDLANTVKVRVIDNDETFAIDEYFFSFFNKGQDALNVLRIMINDNEHHQGDREVATPTGQRDSVVSPTRTGATPHISENVRATLSPLPAPHTGRSSTSEASAHSSADVAGKGRDVRRSMDASRTFQRSSYEVRRPSHEGRRSFSGGTQYAQSKARPGDRSPQSPRVADSESATLSLDPGTESSAAIQSMDESNASASQILDRSDVFRAPNHPPAINKLDHQARNSQETTRSSQLKSPNWGKRDKQPQTPTGIPDFEDDTDNSQAHRLSGSSSALQDIASYPLQKASGLAGFLRTRSKKMGSLLATESMGYYEKVSGMLAGGRKHYNTAEGLETGDQVHVFEDDEDAAKAAENFRDHFAFPETEVLQSSFFASLQRVLPNYGKIYISGRYFCFRSLMPTSKTKIILPMRDIENVNKEKGFRIGYHGLAIVIKGHEELFFEFSKAEYRDECAITVLRILENTKYLEDEDSSSSGVDSEDEAAKAEHDLLQQARELTDSNKHVNVSEIVRVADNDRIPLIFDDPLASFVDFKPSEPLTIVCLTIGSRGDVQPYIALCKALLKEGHKPRIATHAEFEPWVRKHGIDFAVVDGNPAELMKICIDHGMFTYGFMKEANSKFRGWLDDVCSSSWRACQGADVLIESPSTMAGIHIAEALEIPYFRAFTMPWTRTRAYPHAFSVLETKMGGGYNSLTYITFDTIFWAAISGQINRWRRRELGLQGTTQHKMQAALRPFLYNFSPHVVPPPLDWPDWVRVTGYWFLDESDTYEPPTELTAFIQKARTDKKKLVYVGFGSIVIDDPAALTKTVVDSVLKADVRCVLSKGWSDRLETKDASKPEIPLPPEIFQIQAAPHDWLFKQMDAAVHHGGSGTTGASLRAGIPTVIKPFFGDQFFFAQRVEDLGVGMWMKKVNTSVFSRALWEVTSSERMIVKAKVLGQKIRKDNGTQVAIQTIYRELDRARTLIKKHTKQDDDQTDEFEEDWTMIEEGEEMDAAAHGFEVQQPLAGINQDASRTGRGSLVLGSMVLRGAGAQKRASESAHEE

SEQ ID NO: 7652 - protein, 1319 aa, Hydnomerulius pinastri
MRIGTQTLIQALQALPWVDDPDNEDEKMSPNVPQMDSDSDDEQLDEPHMASSIHAIYRPVARSRRTETSQSLLTGRGLTVQEEVQEGADTDPDMNLASEDDVDVDDFEATTPRPPGTQTTDQLATPVPPPATVQLGPAMRRREPSRTGSMTTVKLNRRTRLAEKLKEIFELDIISEVLAEMPCWLLRSVLLQGYMYLTNSHLCFFAHMPSREDQVLKSGTLSKKATRTKRWIKHWFVLKNDTLSYYQSSSDPYFLNGIVDLRYAISCDPAGEREIRLRTNQKTLYLATDSVPSRQEWVKAIRKVIFKAQNMGDTIAIPYSVILDVEKSSAIDFSETIEVKVFDKEEHCSIDSYFFAYFHDIQAALEHIRDAVRIHRILPPKSPQALLDTTTTRSPTSPVHGIDRARSLPTPDVKSSSSFRLSAFLRPFQDSLPSPLARMYSAPEPPEGSEDFTHISKRAGTSFVPVTTLPLSSSPTTGNITPTSAHGLSADSQSRDHTYPPSTSVGDLASASSPSKSLAASVPWNVGVPSWLKVPRKGLSSSASSNAVAPAFPASQSTGGIREVYSTHRSSSLGQASGTPGGELGYSVLETAEAAVDPEMAEKFRSWFAFDERESLLGYFSGYLFRLLPVSGRLYVSTNYFCFKSTGPLSTKTRMILPIRDILTVEKTKAARFGHHGLIVVIKGHEELFFEFGFEDRRRAFVSILERQMDDIRKRPNAGDVPALSSGKKDALILEEFEPRESFSSDNDPAPPSEAMSESLPAVMFTSASSTFLTFKPKESLHFTFLTIGSRGDVQPYIALAKGLMADGHRVKIATHGEFQAWIESHGIEYGYVGGDPAELMRICVENGTFTVSFLKEGLLKFRGWLDDLLKTSWEACQGTDVLVESPSAMGGYHIAEALQIPYFRAFTMTWTRTRAYPHAFAVPEHKMGGGYNYMSYVMFDQVFWRAISGQINRWRRNVLRLDNTSLDRMEPHKIPFLYNFSPAVVPPPLDWPEWIRVTGYWFLNDADVGAKKWTPPPDLLPFIDSAHQAGKKVVYIGFGSIVVSDPKVMTRIVIEAVVQSGVYAILSKGWSDRLNTQTAEASQTEEPLPKQIYAISSIPHDWLFQRIDAACHHGGAGTTGASLRAGIPTIIKPFFGDQFFWADRVEALGIGSGVRKLAVESLKEAFISATTDQKQIDRAKLVGEQIRSENGVATAVEAIYRDLDYARSLIRLSSNTIAGATDDNDGTREDQIPDSSISTLNRSRYDSLGSQRGSEDWSVISDAEDRRSSFGSRMNEGKLDRSITLKRNSLAAAVMSVLPDALTSSNHRRTTSASSAQP

SEQ ID NO: 7653 - protein, 1288 aa, Naumovozyma castellii
MPLPKNTKEITTCLPETSPILKSADHISKSLSNIKPKRGVTDIPRAMTGTLVRTILPEGKSKSRSKRNSEPKGEEADLAKSKYMMKSIAGLLTTASVYAGLDNIQNADSLAMNSSEIKEDDMANKQEEKEQKSTDEPLAISPDVKVRKPTLFDISIVPKDENDSEKENPEYLSAKRNMIIKKLSEVFTLPQEEKFMEEFPSWILKDVLVQGHLFVTTSHLLFFAYLPKPSGAVKMSGNLYIRSALTGSTRYWGVLKDNLFSLYNSPTDIYFPVLTIDLRNVTKIEVQKSFRSHNPTEYFKIITNEKTFKFIADSVNSATSWCKVLKKQQFSCQNTSNNSISLKIPLSNILELEDQKLVNEASIFVVKALESPETFAVDDYVFMFLDDSGSTLKNLLETRLKELKENNINILYGAEEEEKEEKLEPMNSDDLVKSIPKYIRTENILRQELAKLSLRRLTPQFYVPTAGSLIPQTPNVLSGGLNYLPSPTDYLPSRKNLPLTLASSQNPILDEIRAGPLIKRIRAKSGHWLKKRHQTDDNKIEESIVLENQSDSKLQSNEHKQPLNTDESTTQLNSISIEDQGSEILNDTDSIQSFELKSSPSKKGAVSTWAIHPLKNVTSMWQSTPLHYPNKAIEFTDDDKSLITSEKEVTLSNDRFRRHFILDENEFLISAYYTHLIKNVPMYGKFYIGDEVICYRSLIPGSSTKMILPLRDIETCYKEKGFRFGYFGLVIVIRGYEELFFEFASSLSRDDSEIIILKQVEKFREQQGTKDDDTNICRTESNTQHAKLKFLEDKISAGGYEVPLMLEQNPHFDVKITPNKSYNIGLLTIGSRGDVQPYIALGMGLIKEGHNVTIITHEEFRPFVESHGINFVELAGNPAKLMSLMVEHESMNIGLLREASANFKGWITDLLESSWVACKDLNLDLLIESPSAMVGIHLAEALDIPYFRAFTMPWSRTRAYPHAFIVPDQKKGGNYNYLTHVLFENIFWRGISGQVNKWRVETLGLKKTNLYLLQQNKVPFLYNVSPTIFPPSIDFSEWIKVTGYWFLDEKLNYKPPDDLIAFISKARTLNKKLVYIGFGSIVVSNAKEMTMALVEAVQNAGVYCILNKGWSDRLDKKEDKLEVELPECIFNSGNVPHDWLFPQVDAAVHHGGSGTTGATLRAGIPTVIKPFFGDQFFYASRVEDMGVGIALRKFNTKTFTQALKDVTTDKRMYNKVQEVKKQIAAEDGVKTAINCLYCELEYARSVTEDRRKRTKDPKNPLQSMKSTVSNVVPLDLRSMGLEDSWILL

SEQ ID NO: 7654 - protein, 1532 aa, Cavenderia fasciculata
MNSTTTTTTTTTSSTHNHDNNNNTTLLGDYTTHKIPYDLIFIFLIGSLSILTYFIYWLVTYLLNTHLCGNTTTMYKKIPQISIDSLSSLSKSVLHSSSQSINDTDDDLSDYVSINESVLHHHQQLQQQREGHSHSHSHGHSLSSSSSSSTTTTHFNIPKCVFFEHPSGSGVVADDDLENDQPIIIDNQPVTIEELKQRVIKELADNDLWKSPVDTRILALVDCSLLHNHLTNANLIITSTSLCFLPTEQVHKGHAVESYLHMKAKSDFFWKKYWFHLSGGSLSWYRSSEHKEIYYPNGSIQLKKITSIQKLPSESATRPFCLQIATNAQIYLIQADSETQLDQWFSEIVHIQRNLTISLSLSDIVTMQMESDAALFFDSIYITLKRGDNFIITPSSRPNEIYNLLLSAWGKSKKLESIDQNTNINNNQTSNNNNNNNNRQTIEFQKVFKLNQFVNIILEKPCILFNDIETSYEGVVYAAEDGLYFNSDHNQNGSVALIIPVNDIISIQIDPESDIPEAIKVVTKEYEAYYFDLFDDHESFYESIVSIFTQFNPAIKYGKQGEDFFIKQQQVMKSEEEEEKEKENDSRWFHLPVIPISIPKSIPTRLFRSKSSPASVSPPLNTTPPNGSPLNSQSPSIHSTNSSPALSQQLSSLNLHDTSRTIFIQKGSPQNIQSELHQLFPTLPLNEAVQMYQSCTLHYDHMTNVSIEGHIYVTKSYVAFAPINSQSSSSLTSSTSFKSITPSSSPLSSSSFHLYNHNQNNNNNNNNSNSNKDNSSHNKKRLMKALIPFEDVVSIKKDRTIFLKHCIKIITNDHKWIFGSLNNFYSLYKILLVNWTPINEGLFTPLQSNQIREKFGLPSDEPLITWYNCTNFRGAQLKYGVLYITKHYLCFRSKLGFKKRTIVVPFSSIVSIKKYSGTILPNGIKITTTQQDIDFASFLHRGRVYRQLIECWNDNRGTLQKSTNNTSISNNSSGNNNGQKIGGGGIPKLNIDRIQVTSASTSPLVISPTVQSPRTNLNITILTIGSRGDIQPFIALALTLKNAGHNVVFASHELYRSIIIDTYGLTFKPLSGDPKELMDLCVRNGIFTPKFIKEALSRFRQFIDDLLNSCWEAAQGADALIATPGCFAGPHIAEALQIPFFHAFTMPFTRTRMYPNPFAPFAASQLGGVFNLATHMMMEKILWQPISGQINSWRVERLKLPAWNSSVSINETYRLPYLYCFSKYLVPKPSDWGSEICITGYWFMNETNMPEDKDHPPSQELIDFIERGDAPVYIGFGSIVIEDPNELSRLLQEAVKLSGRRAIISQGWGGLNIDQQVGSTAADAEFVQKNIFLLKQPVAHTWLFEKMSLVIHHGGAGTTAAGIYAGKPCIIVPFFGDQFFWGERVQDMGIGQSLSSKTLSAKSLASSINELIDSKSAHIRVKEMANHIRNEKGLKQSLQDFYRYLNVAYVPPSKTPMGSKTSCRQCKQGFGLLNQMVNPLVQTKFHCHCCGQVFCDKCTLNKIPLPKFRINIPVRVCDTCYSNQFTSNSNNI

SEQ ID NO: 7655 - protein, 1325 aa, Wickerhamomyces ciferrii
MEEDTLPEERSRRSRSPTLERVNRSFKSASRSLAALSPPPVKRSLSPLASSLSRIGTRRSSSKSITDSNAYHVSKGGGGAGDQLDVAKPSGMAKSFVSMLTTASMYNGNLQDIIDEEEPVADSQIQINDTATEGNASDLDVDTEADTGKNHDQEEQQPIESKQNEIPTLEDFPSLERSPTLFEISIAQKLNQHSKDVNDCQKRAIALSNKLKSVFQINSNDIFLADFPCWLLKDVLLQGHIYLTQSHLLFFAFLQKRKPDKIALKGNLSMNISLTSPRQNRYWAVLKDQTFSLYNNSTDLYFPVLTIDLKNALRAEIITETGGLLPHVPGVPGKHHQDHTSKSNGSWFKILTETKSYKFQADSSHIARSWVGLLKKHIFASRNKGDSVSVKVPLQNILDLEETPIFESAETLKIKVLENSESFVVDDYFFMFFNSGPEFTKLIHEAIEANTNLSSDNNNFKIPENVVDSTGKLDLNTIKKSKTSNFFPLKKVLSKTRSRSNSNTSNKPISRCATHNNDEVSPPLSPISAPPTSSYSLQGNFSPTSFNLQEPVVEKFNGSDEVSSANLTNQEDVLVTTSDEEAEGGDVEPEDFISKQLEHDNLLQPKDTNKSSSLLPAYINPGKALNQAKSSITKFTPKVIKSASFMWQSNPVHYEEENSLERGLEDEFLATPKERIEANKRFLDHFTLPENNFLIAAYYAHLQRNVPIYGKVYLGVKEICFRSLVPGFHTKMILPYKDIENIYKEKGFKFGYSGLVIVIHGHEELFFEFSSNIARDDCEFLLLKQLDKFNSTIIDNGSNDVESALSTSGKLQAAKIQYFEDKIHSDTGFEVPIMIEDHPLMKTSIKPSTPRKFTLLTIGSRGDVQPYIALGLGLKKEGHIVRIVTHKEFEDWILKHGLEFKEIAGNPTELMSLMVSHGSMNVGLIKEASSKFRGWITELLNSSWEACQDTDILIESPSAMGGIHIAEALNIPYLRAFTMPWTRTRAYPHAFIVPEQKKGGSYNYLTHVLFENVFWKGISGQVNKWRKEVLNLPKTNLDVLQQNKVPFLYNISPTVFPPPVDFNDWVKVTGYWFLDEAIDYKPPKDLIDFINQARIDGKKLVYIGFGSIVVSNPKELTEAVVEAVLESDVRCILNKGWSERLGGSNVVEIELPYEVFNSGSLPHDWLFPQIDAAVHHGGSGTTGATLRAGLPTIIKPFFADQFFYANRVEDIGAGIGLKKLNVKTLSKALKEATTNIRMINKAKIIGEKIRKENGVTNAIETIYRELEYAKELVNNKKSVIITNEEEELIDEDSKSQIMNINEIDDVAKQVDEDKDLEEEGSWLLV

SEQ ID NO: 7656 - protein, 428 aa, Unknown
  Description of Unknown: Candidatus Filomicrobium marinum sequence
MNILIFTFGSRGDVQPYVALGTALRRGGHQVCLSTGQGFDDMIAAHGLTAAPLSINYRELIDTPEAQAAFRSMSGKFRAMRAFKDVVCEQFREMWELSREVRPDVIIYHPKGFIAQDIAAALGAVAIPTTLQPSYVATSEFPNPFLPFTNLGAFGNKLSHHFIERLTFWAQRNMEGRWRKEMPARANSTSRGTFFGGHDPEGRTVPRLHGYSSIIVNRPRDWTAREHITGYWFFEPNTDWEPAEDLHRFLATGPPPVYVGFGSMPAADAQSQTGMVIEALRQAGQRGILATGWGGLKPLAGSANDVLFLDVAPHDWLFQRCAAVVHHGGAGTTHEGLRWGRPTVICPLGVDQPYWGRRVNALGAGPPPLPQKSLNVADLSRAIGESLKPGTVARAAKLGEAIRAEGGADAAAAVVNGFVVGAGRPHAS

SEQ ID NO: 7657 - protein, 1312 aa, Plicaturopsis crispa
MRAGTQTLIQALQAIPWTDDPDQDDEILNHGLPVDSESDDEAKPTRIASSIHTIHRPVARSRRADLPPSPASKSKSHAFTVDERDDDSLTSDEDIEGEDLEASTPRPPDGPSPGHLSRLYTSSAPLSHSVNVLPPSRSIMSRTGSMATVRLQRRSRLAEKLKEVFELEGIEEVWAEMPCWILRSVLLQGYMYLTNSYICFFAHMPSREDQILKSGTLNKKATRTKRWIKHWFILKNDALSWYQSSSDPYFPHGIVDLRYAISCEPQGEKDIHLRTNAKTIYLSADSVPSREEWVKAIRKVIFKAQNMGDSIAIPYSAILDVEKSTAMDFSETIEVKVREDHFSVDSYFFAYFHDLQGALEQIRDAVRAHRTLPPQTSPRQVLDTTLSRSPSDPHQHPAERAQTMPESQSIFNRGPFSLTGLLSPLRSASDTPVSGRGASSPANPEQAEGFTHITKRPTNSLISDVTPEEVLPNEPHRSTTTSTTTLTPSSSRLEHTYPPSTPTVDLYPTVSREASGSAWTVGVPSWLRGSTRKILPSSMSNPAVVEPASPTGVSEVYSSTLSSSSSQSQSGDLGYSVLESPEGAVDGEMSDKYHTAFAFDDKETLLGYFTGYIFRLLPVYGRLYVSTNYFCFKSSGPLTAKTWMVLPIKDILATERTKATRFGHLGLIVIVKGHEELFFEFGDEGRRNAFVKLLESQMEDVRQRLALGEPVSATAGERDALILEEFEAKPLNSSDEPRPAPDNMADSLPAVMFTSASSTFLTFKPKESLNFTFLTIGSRGDVQPYIALAKGLIADGHKAKIATHGEFKDWIEAHGIEFGYVGGDPAELMRICVENGMFTVAFLKEGLQKFRGWVDDLLKTSWEACQGSDVLVESPSAMGGYHIAEALGIPYFRAFTMTWTRTRAYPHAFAVPDRKMGGSYNYMSYVMFDQVFWRATSGQINRWRRNQLGLAGTSLDKMEPHKIPFLYNFSPVVVPPPLDWPEWIRVTGYWFLDDAEVSAKKWNAPSDLDAFIDNAHSLGKKVVYIGFGSIVVSDPRAMTRCVIEAVVKSGVYAILSKGWSDRLNIKSEEVAEPEEPLPKEIYAITSVPHDWLFQRIDAACHHGGAGTTGASLRAGIPTIIKPFFGDQFFWADRVEALGVGSGVRKLTVDSLMDALIAATTDSKQIYRAKLIGEQIRSENGVATAIEAIYRDLEYARSLIKRAARDDLTEEAVLMADNSTIRDEMTTSPVSGRPLSGYSSSGRTSEDWSVVSDGDDRRDDRRSSFSSRRSEGKADKSFKRKSLAAAVLSVLPDSLAPTNLSHRRSRSSSSAKS

SEQ ID NO: 7658 - protein, 1534 aa, Sporisorium reilianum
MSTSQPHSPRELSSSLANDKAAAADLDPFSLDDDAHEEQLPLPPPAQIPDNLDTPPFPTSPRLDPWSPRNYSTISSLAGSRELGRPALEPTTKIFTQSAATPPLSSAPSTGSVQPTATASSNDLSTAAVQPDAFDVSFHAEPQGLMQMLSLVGSTFFDADTDGYTEDDADELEAPADPTHRHREQQRRVTHAEPTQQEPQSRHSDHDQRTLKGRVHALARDDGSDDGSTPQGSRSPLDASVLTIGPSRPKQTSLTQSDIISSSRDSAATRAARRPSNLRSQLHNVATASMFASTSTSNLGNSRLDQDARELRPGSSPFDVDPSDTQHVPAAEQQRGMPRLPSSNRGLDPLLIRPYLETQPSGQLPPADNAGMDRDRLLQQLKDVFQLDAAETLLLAQPCWLFRSLLLQGHLYLTSGHVCFYAYLPSRDEKTIKTDWLRKRTRRTHRFSKHWASLKAGKLSWFDSDRDPYFPQGHIDLRKVSAVERSSTHKDRFKVTTPARRFIFLTEDEPSRDAWVAALQKETFRAQNQGESVRISIPLETVMNVDTTLSVDGTEMVCITVVDEAGDFSVDEYYFLHLTKPSAFMADLSSLLEQAGRGSVASLHSGEAALNLSRLSIRDSTGATHAAAISRKSLEEVPTLPKVRVAMQRNDEAEHAVEASESDVPQRRGSTDKQHEHELPSTSTSTATSAIAVPISIRKNSHEASAADAILSTTPRAAALNRLSMESTHTYPPSPSTSDPPSSFDQVQKEAERGWAIPDWLRSAPARVLGRGSDASPAAASHPKAPTTGASSTRRRRKVLEQWSDDKADDVSRGDSSNTDNEDDILSHSIHSAQSNYSMLDADDQEAEPADHASVAAEFRDTFGIGEDESLIGHTHAYLYRVLPVAGRLFVAEHHLAFRSSGIAAKTVGRTLMLVPLQDVISAAKHVAFRPGHHGMVINISGHEELFIEISSAHRRDELLSLVEYQLELIRGGRGSRQSREAVTRERSHALVLRDLSERINDAPATASMTSSADSSVLSQTGSRLGSRSNSLSQVGGGSSILSFSPPTPLTFTMLTIGSRGDVQPYIALAKGLQADGHRVRIATHAEFGDWILGHGIEFSEIGGDPAELMRICVENGTFTVSFLREGVTRFRDWLDDLLASAWRACQGSDVIVECPSAIAGIHVAEALQVPYFRAFTMPWTRTRAYPHAFAVPSKKAGGNYNYMSYVIFDQMFWRASSFQINRWRKNLLKLKPTNFDKLEQHKVPFIYNFSPSLVPRPLDWFEWIHVTGFWFLDNPDNSSSKAWEPPADLVAFIRRARERGRKLVYIGWGSIVVPDAAAMTRCVLEAVRKSGVCAILSKGWSDRLSAGDARSAAPEVEDVFQVSSVPHDWLFPQIDAACHHGGAGTLGASLRAGLPTVVKPYFGDQFFWGQQIESLGVGSCVRHLTADTLAAALITATTNAKQIERARKLGEHIRTEDGIANAIKAIYRDLDYARSRIKRDTRIEGGAESTDTAMLRQPSGEDDEAGNTSDEWSDIGGAASPSPQRGSASAVLG

SEQ ID NO: 7659 - protein, 1289 aa, Amanita muscaria
MRLGTQTLIQALQAMSRTEPDNFTELSDQTNSAGSESEEETDGFNRLASSIHAIHRPVAWSRCRSNRSNARDRDTSVVEEAGPEELLDSGEDEGEDFEDSMPQLRSPASGGESGTAGASQQTTILSYSRPSAPRTGSLNTIKLQRRTRLAEKLREVFELPGIEEVCAELPCWLLRSVLLQGYMYLTNAFLCFFAHMPSREDQVLKSGSLNKRAQRTKRWIKHWFVLRNDALSWYQSSSDPYFPQGIVDLRYALLCEPVGEKDIRIRTNQKTVLLSADSVPSRDEWVKAIRKVIFKAQNSGDSIAIPYSLILDVERSSAMDFSETIEVKVFDKEEQYSVDSYFFAYFLDMSAALEQIRDAVRAYRTLPTTGHPQSVIDTTSSRSGTNFAIERSATLPTEPSSPKSTSVFRFTSLLRPFSSTTSSPTSGVSSPESADDFTHVSKRANSSSFIPVTYSTTPAVSSSGPSRGQQASTDPAKASTGHTYPPSTSFSSVHPDKSSLSRESNSSWSVGVPSWLKPPRRIFGGPTTSSYPPLPSFDIAGVREIYSSMSPTSARPPGSDMTYSVLETPEAVVDLDTTEKFRTAFAYDEKETLLGHFPGYIFRLLPVYGRLYISTNHFCFKSTSPLAGRTRMALPIREILAVEKSKPNRFSHYGLIIIIKGHEELFFEFGAEDRRDAFVALLERQMEDVRKKQASQDTGADTVKHDGLILEEFEQRVAHDDNDPPLTVPDEMTDSLPAVMFTSASSTFLTFKPSHSLHFTFLTIGSRGDVQPYIALAKGLIADGHRCRIATHGEFRAWIESHGIEFGYVGGDPAELMRICVENGTFSVSFFKEGILKFRGWLDDLLKTSWEACQGTDILIESPSAMAGYHIAEALRIPYFRAFTMTWTRTRAYPQAFAVPESKMGGSYNYMTYVMFDQVLWRAIAGQINRWRRSTLHLASTSLDKMEPHRIPFLYNFSPHVIPPPLDWPEWIRVTGYWFLDDADVSAKKWTPPSDLDEFIDKTRASGKKIVYIGFGSIVVSDPKALTQCVVEAVIQSGVHAILSKGWSDRLHSKSSEASEPEVALPPQIYPISSIPHDWLFKRIDAACHHGGAGTTGSSLRAGIPTIIKPFFGDQFLWANRIEALGVGSGVRKMTVAALTEALITATTDIKQINRAKHLGEKIRAENGVATAIESIYRDLEYARSLIKAPPTETYLQDEAETQDSSAALSSDPQASSPLSGPRRSPSEEWSVISEQDDHRSSISSRHSGVVRENNSRRGSLAAAVLAVLPDSLTPSSPRRRAASMSLQT

SEQ ID NO: 7660 - protein, 412 aa, Janibacter sp.
MKVNIMAAGSRGDVQPMVALGVGLTRAGHDVTICAGNDFEGFVTGHGLAFVPAGVRIDELIASPLGVEWLGHSSRNPFRELSALRRFVRQSTQGYAGALVPLVGSADLWVSGVLTVHAVDALVSVGGGRHVVAEFAPMRPTRSGAATMQPAFTTRSSIANLIAGQGTLQTMSSVFAPPGDRLRAELGLPATGRRGFLDAIRRTPGVLAASPLVVPPPSDWHGTSEATGYWFLDEKATYTTEPALAAYLKEGSKPAYVGFGSMSTREAAATSEVVAEAARKAGVRVVLHAGAAGLGSTDDEWVQVVGDVPHAWLFERMAGVVHHGGAGTTAAALRAGVPQAVVAHIGDQPYWARRVWELGVGARPVRRHQLSAEWLTEVLRGFARGESAARAAAVGAEIRREDGVGRAVALLT

SEQ ID NO: 7661 - protein, 1533 aa, Candida tropicalis
MPFYKKVTHALIPESIHNLATHHGCGDDKSDKEVEKTTSVPTASSKDDELTSARERSTYHSISGRLSYEDDDSDDDFDAAKVEEGGTFFSELLNTATICSGLGSLNTLKKQYLDELLKKSGLHNLKPQQQHHHHHSPQLAGKHDRNQPVASSVNKESSLGKSQQFSSEDSDESEDSSIEEEFVANDLEATQISGTNEPFKSTSTDTSPISKVETVASTTTASSATATPTATTQVKVATETKVAHIPHEDLEGLNPLQRSVVTNLDPHSIKEGILIKVKPGQRPTEEELQNEHEQIKEKIRLRLKIADKLQKVFSLDDTDEFLGNYSAWLIKDVLLQGHLYLTKEALLYFAFLPKRFSVEHASEVLNIDDSSNIVHKGTLGYKPRKYGEVILNAVVQHRYWAVLRSETLSIYSSATDLYFPELVIDIKTCLYAEVVDKEKYGKEAISPVNRSGAQSPMGPNSGTETPGTPAIEEYTSELNSMMSADSFAPTEDTVESGSTNIWFKLVTQKRTYKFQCDSSFSARQWCNNLTKLIFQHHNANTSSEVLIKIPISDIVEYNKRTLFDEEADHDIDHAKNDIPLNLSIKYLANAPVSADLAKQKAKSKKTLKEQDNMTIEEVNFLFPKNGVEFFETFDNAMHDGKQGVDELSKLTTVDSSTSLKSMSTLSPSSNALVKTVMDHNKYTEPNDGASTLKKLSKTITSPTRIFRAATLGSLDRPSIASVTSNDSTGKDSHLQLPRALSERGLQSLDISFVTSLKKMEEAASRYDKPSFSPDELPLPSNLTDPFEVKKQSRRPISKSIKALSNVASRWSSTPSHYVDDGRFYVGDASEREESQRNFQGHFSTNSKLLATYYAHLLRTVPVYGKLYISETEVCFRSLLPGVSTKMVLPMMDIEDVKLSAIVKLAYYRLSLMVNGAEELSFEFGSSKSRDDFREIVLTQLEKLHSNEGFRPKPHQWGSNYDIELSKTRMEYTDSERCQIQKAFDDTSKDVQLAEQRIELARVRMFEDRLMAASGLDVPIILEDSPFFKTEMRPSTSYNITLLTIGSRGDVQPYMALGKGLVKEGHNVTIATHGEFGDWIKKSGFNFKEIAGNPAELMSFMVTHNAMSVSFLKEAQKRFKSWIAHLLTTSWEACQGSDILIESPSAMAGIHIAEALGIPYFRAFTMPWTRTRAYPHAFFVPDQKKGGTYNYLTHVLFENVFWKGISGQVNKWRVEELDLPKTNLYRLQQTRVPFLYNVSPTVLPPAVDFPDWVKVTGYWFLDEGSGDYKPPEDLVKFMSDAAADGKKIVYIGFGSIVVKDAKSLTKAVVGAVQRAGVRCILNKGWSDRLDDKGKDKIEVKLPPEVYNSGAIPHDWLFPRIDAAVHHGGSGTTGASLRAGIPTIIKPFFGDQFFYATRVEDLGAGIGLKKLTVKSLGNALVTATEDLKIIEKAKRVSEQIKHEHGVLSAIEAIYSELEYTRNLTLVKNIYDQNYKRHHPDFKSQSGIQSPVEASEDEDSEDEDDYDDEDSEECNEEKDVYGDKLSEQDSKKQAQL

SEQ ID NO: 7662 - protein, 1464 aa, Ceratocystis platani
MSSSLVAIPPSDDPPPSASASASTHPSSRKPAALSRQRPESMGPSTIPELPDRLKEADDSDEEDVVAANRGMVNMNQSLFGLLAAAGSNVDFNQRFQDHSSDDDDNDVNSPEPSRPLPKPKRAVAVGRDYDDADNRHHRSKLASHRRRISESRLLKSFANLPHFRKSRTSKSSSLQAGDGESRSHSRSHSRSHSHSHARSPSSSAAPPLFGHRDSDSSLAEVDVDANDAALAPVMSRIIDGQAEMAARPSFDLDGIMRDQLAASTTTLKPSTGVIREGATSASTSTLAQKLKAIFEFDEPEDVIRERVASRLHDKVVKAGFLGKAGRRSPKYNRYHFRLKGDQLTYHEASTDLYFQTGQIDLRYGMSAMIVDKDKEGTHFNLVTHERTYHFRADSPASARDWVRGLQRVIFRSHNDGDSVKISLPIENVIDVEDTQMLDFAETIKIRVIDNDDTFAIDEYFFSFFSNSQEAMALLKLFCEKAQGSKNKERLLQKPHSASASASASASACHSASVSLPVSGSHTPDPDGSQARTHAQANNLCVRTAKLPETVKATLSPMSPHATHTHSPSPRASIDGHRPSFDTFRPFGRRSMDRQSIATLDAPTRRSFSQSRRSISGQRVSDKSLSSGLSGSGFTDMKNSMTESYAQSGSVDDYSMAMISSIEDHSVTGSQILHGSDVFRTSQTTKTPPLDVPEQKDGPAVGTIGRKEPRSAKNGDEEDLESQGQTLQGIAKMGALPLQRAGAWAGYLNRTSRKMSSLLATESMGYVEKVSGMWKGGRKHYHSTVNTKRDKDDPADGTQELDEDKIGSSNERFRSHFGLPESESLKATYFCYIMRVLPLYGKIYLSDRMFCFRSLLPGTRTKLILPLKDIETADKEKGFRFGYSGLVLVIRGHEELFFEFGQAEVRDDCHNMVEGFLEASRLLRSSGFASEGEDEKELARNALAEHDALQAERLLKEKLAETAKLGDSTPVLFDDTKPSMINLKPTAPLRITCLTIGSRGDVQPYIALCKGLLAEGHKPKIVTHAEFGDWVQSHGIAFAPITGDPAELMRLCIDNGMFTWTFLREATTMFRGWLDDLFLTAWKGCQDSDVLIESPSAMAGIHIAEALGIPYFRAFTMPWTRTRAYPHAFAVPEHKMGGAYNYMTYVMFDNLFWKAIAHQVNRWRNTVLKLPSTTLEKLQPNKVPFLYNFSPSVVAPPLDYSDWIRVSGYWFLNEGSGEDWKPPADLQAFIDKARADKKKLVYVGFGSILVNDPGKMTQEVIDAVLNSDVRCILSKGWSERQTSSQTSSGKSAAPKAPEPTIPDEIFVIKSAPHDWLFAQIDAAAHHGGSGTTGASLRAGIPTIIRPFFGDQFFFGTRVQDIGVGICLKKWGANSFGRALWTATHNERMIRKARKLGESIRAENGVATAIQSLYRDLEYARSLIQRKTGGKDGGGETEEAEAEEWTFIGGDEPDPEVVTQRLSEM

SEQ ID NO: 7663 - protein, 517 aa, Schizophyllum commune
MIVGSRGDVQPYVALGKRLKQDGHRIRIASHENFRSFVNDNGLEFYGIGGDPHELMSYMVKNPGLVPGMESLTNGDIPKKRKVRSEESLQLAFMLQGCWDSCSSPDETTGVPFMADAIISNPPAFAHIHCAEALGIPLLLSFTMPWCATGAFPHPLVNVKFSNAGERLTNHMSYAVADILTWQGMGDIINKFRNRALGLPSLSVRSGPGLADRLKVPWTYCMSPALVPKPKDWSNHIDVVGFYFLDLAASFTPPDDLAAFLASGETPVYIGFGSVVVDDPGEMSRIIFEATAKAGVRAIVSAGWGGLGGLEVPPHIYIVGNVPHDWLFAEGRVSAVVHHGGAGTTAIGLSKGRPTVIVPFFGDQEFWGDMIHRAGAGPAPIPHRKLTVENLADALVYATSPPAQEAATKMAKQITTEDGVAAGAESFYRHLPLLNMRCDVCPDKVAVWWSTDQCLKLSALAAQTLIEARELKLEHLDLHRTKEYESRKKFRDPLTAGVGAFFWTILQCEAGLVELFT

SEQ ID NO: 7664 - protein, 1463 aa, Pluteus cervinus
MSNTFQEPPSLSDINLTPTAPDAALAPETMTQDRPTESSTSPTSSRVKRLSNVVEKTVEKTVDKLNRSLSGRSSSSGHSTPPASSRGIFSINHKGKGRQESGDIDASTLVSSPIMSSPISPRASSTPSTIVPHEDSPFIRPPSPLPTRPPSTPFRGAGSMRPGTQTLIQALQALPWLDAENEDDLSPLEHGQDEEGSDEERDKAHDRLTSSIHTIHRPVARSRRVGVPSNALRPFRERATEDEQDGDRSDEEPEDEDFEDGTLKVPVTTTLHPVGQKAGPSAPRGVDPRVSRILPSRTGSTATVRLQRRTRLAEKLKDVFQLDGIEEVVAEMPCWILRSILLQGYMYLTNSYLCFFAHMPSREDQILKSGSLTKKAQRTKRWIKHWFVLKNDALSWYQSSSDPYFPHGIVDLKYALSCEPVNDKEIRIRTNTKSVMLSADSIPSRDEWVKAVRKVIFKAQNMGDSVKIAIPYSAIIAVEKSAAIDFSETIEVKVVDNPERNADDSYFFAYFHNLPAALSQIEEAVRAYRNLSIQPSAKLVLDTTVPRPTSSSERAVVSAGPATTPRSTTSVFRLASLLRPLQAGISTVRGTASEPPPELSSDHDDFTHVSKRANSSFLPYTTSQRIDSQGSSDKAQDDVKGVTSAASPNHTYPPSTSNAFIYSDYTFSSRETSSWASVPSWLKGTKNLISTSLGYNTLSATPTGIREMYSSTVASSSPTPSRPNTNGLGDLAFSILETPTIPLGLEMVEKFKKAFAYDDKELLLGYFPGYIYRFLPVHGRFYVSMNFCCFKASGPLSVRTNMTLPIKDILATEKSKAWHFGRYGLIIIIRGHEELFLEFNDEEKREAFLVLLNRQMEDVRRRALHGEPIPASPGKRDALILEELGPETSTALLNPAAHLSESVSDSVPAIMFTSGSSSFLTFKPSKPMHFTFLTIGSRGDVQPYIALAKGLIADGHRCRIATHGEFKEWIESYGIEFGYVGGDPAELMRICVENGTFTLSFMKEGLQKFRGWVDDLLKTSWDACQGTDVLIESPSAMGGYHIAEALGIPYYRAFTMTWTRTRAYPHAFAVPEHKMGGSYNYMTYVMFDQVFWRATSGQINRWRRNVLHLGGTSLDRMEPHKVPFLYNFSPHVVPPPLDWPEWIQVTGYWFLDDADVSAKKWAPPPDLVDFLDNARNLNKKVVYIGFGSIVVSDPKTMTRCVIDAVLESGVHAILSKGWSDRLHVKTNDAAEPEERLPPQIYPISSIPHDWLFRRIDAACHHGGAGTTGASLRAGIPTIIRPFFGDQFFWADRVEALGVGTGVRKLTVASLADALRTATTDIKQIDRAKLIGEQIRQENGVEKAIESIYRDLEYARSLIKRRGVDEDIDDLDDLEADGSTILASHGQDYSGYDSSGSGRGASEDWSLVGDSEDRRSSFGSRISEGRPSKDSPNKRSSIAAAVRSVLPEALTSTSPRSSLSLSRS

SEQ ID NO: 7665 - protein, 1241 aa, Ogataea angusta
MSGIESTEEPCDSMTESQSLSPLEPEERQTRKDSGLQSQSLTKRHFAFSPHRLITSISRHTSPHKPRPKSESRVPVPKLHSLPPQRLASPERDKPSIEGISKSFVSFLTAASVYAGFQDLEGEDQQVSPDDVSAGESEDQQADESSDEQEDDDQDDRTFYATDPSPTELTINENTPLPEPEPPRRTLRKARSRFEFSVVKRLSENENDQLAQKRAIALSNKLKRTFDISDTDVFISDYPCWLMGDVLLQGHLYITKHHILFFAFLPKKQGSISKSGALTTKSYPSLREHRKWAVLRNNTFSVYSNSTDLYFPLLVIDLRTALRAEILQSSSTKQNPSKPVWIRIITESRTHWFLADNLASARSWVSSLKKHIFASRNKGDQVAIKIPLQNVVDLELTSVIGVTKNLRIKVIESADTFAIDDYFLMFFSRGEKAVEDIKKVIHDAGMEISEGTSTESEDEQGVDNNLLKSKIELLKKSPSMVQTSSKSNVPVIRMDEPADDFSQEQESAESSKPVSDDEIVSADDNQELEEKQPQDNLANAEKENHDKVSRANSRRTWSTRSLVQGLTAITQGWMSPSPMAHFDEKYAVLRGEEDSYFVKDAEQRKAATERFRKHFSLTDGEKLIATYHAYLVKGIPAYGKIYLGSNEMCFRSTLPGTGTIMILPFSDIENVNKEKGFRFGYSGLVVVIHGHEELFFEFASDQARDDCEFMLLKQMDMFKKGSTDSSPPNASEGSSDESCNLAESNTSLASARLRMFENRIHDAIGLDVPIIIEEHPLTKTKVRPLKSYRFTLLTIGSRGDVQPYIALGKALMKEGHQVRIVTHAEFEPWIKKHGIRFASIAGDPSELMALMVTHPTINYNFIKEAKSKFRSWIDDLLVTSWKACQDTDILIESPSSICGIHIAEKLQIPYFRAFTMPWTRTRAYPHAFMVPDQKLGGAYNYMTHVAFENGYWRGTAHQVNKWRVETLGLPKTSLAEMKQNNVPFLYNVSPTVFPPSVDFAEWVKVTGYWFLDESETYQPPEVLTKFIEQARKDGKKVVYIGFGSIVVSKPSELTQAVVDAVLEADVRCILNKGWSDRLGTKTEIEVVLPPEIYNAGSVPHDWLFPQIDAAVHHGGSGTTGASLRFGVPTIIKPFFGDQKFYAGRVEDLGCGVSLKDLNYKSLARALKEVTTNTRIIEKAKLVGARIRSETGVQTAIETIYNEMEYARSLSISKVKQVSVVKSDEEFDDDKDEEVEGSWLLV

SEQ ID NO: 7666 - protein, 1441 aa, Phialocephala scopiformis
MAPEEGDLKKRVARKLTKKRRDGHQATMEIPERFREGDDEDEDCTALHGANAYLNQSVFGMIAAAGSRTDFNARFDGQSSDEEDDSGEASNQSSELQVDKTRKGKSSPKPEKHHRRKFSENRLLRSISGIGSKSKSKASPTRTGPPTPESTFATPTPEIQVDRTTSRDAPVMSRMLEARAELSMRPSFDLSRTTEPAEMDENGHQTSSSLAKQLMEIFQFDTPEDVIEEYPCWLLKSVLLQGYMYITTKHICFYAYLPKKSNEVVKSGYLAKSGRRNPKYNRYWFRLKGDVLSYYSDPSDLYFPSGNIDLRYGISANVVDKEKGKDATHFTVVTHQRKFNFKADSMPSAKEWVKALQKIIFRSHNDGDSVKISLPIENIMDIEESQIVDFADTCKIRVIDNDETYAIDEYFFSFFSFGKEALNVLRILVEDTTAQQIPEAMLSPTAAQVEGKDSPKGRISLPKRNSSNSVHSPRESRPMPPPPIRTTTPVLEESVRATLSPIGAPSPRASTEISRASSDAYRRSMDLKAFGRRSVDLNRLNMDGAGGRRSLSASRSLSRNRVDGERRPSEKQGSSDSYVHSLEEPGSSGALPSASDGTQASASQILRGSDVFLSPTIQRAASATRSRDPESSPNDDSRSDSPSRNTVNLGGHPPIRHPATTGSLDGSNAGQGEASASAPTLQTLVKAGAYPLQRAAGFAGYLNRHSKRMSNLLATESMGYVEKVSGMWKGGKKHYDEPAALGSDDDMYGDIEDEQSGSGDRFREHFALPASEKLQAAYFGFLHRVLPLYGKIYISDRSFCFRSLLPGTRTKLILPLKDIENVDKEKGFRFGYSGLVVVIRGHEELFFEFPQSETRDDCAVTLLQNLETMRYLKESGLLTMEEKESAENASAEHKALQQARYEGHAEHDVKMPKSAEEARADGPPILFDDPRASILNFKPTESLKITCLTIGSRGDVQPYIALCKGLIAEGHRPRIATHREFQGWVESHGIEFKPVEGDPAELMRICVENGMFTYSFLREASSKFRGWINELLTSGWEACQGSDLLIESPSAMGGIHIAEALQIPYFRAFSMPWTRTRAYPHAFAVPDHKMGGAYNYITYVMFDNVFWKGIAGQVNRWRRKELGLQATSLEKMQPNKVPFLYNFSPAVVVPPLDYSDWIRVTGYWFLDEGGDWSPPQELTDFIKKARNDGKKIVYVGFGSIVVNDSAAMTETIVKSVLKADVRCILSKGWSDRLDKKDAAAVEVPLPPEIHQIKSAPHDWLFKQIDAAAHHGGAGTTGASLRAGIPTIIKPFFGDQYFSGSRVEDLGVGIFLRKLNISSFARALWESCNSQRMIIKAKVLGETIRKEHGVDTAIQCIYRDLEYAKSLIKRRDGKTADDTLEDSEESWTFIGDEHDPELVKRIHDWETMAQSGNLATSSIQPRRSQDTGRALGLNVRARNNAA

SEQ ID NO: 7667 - protein, 1396 aa, Aspergillus terreus
MRPLLDEAKRRVDRRLSASRQSLSTSRIFPSALPERLKDDHDAQVDYTAPPGGGGTKEGHFQYMQQSIFGMIAAVGSQSDFHARFDDSSDSERDTDRPPQKRTEKESQATDAPPSSKNEKKALRSPQRPKSPSQERGRRHRKTLSGSRILRPLMPGSSQRQGGAQTEPSTGNQMSRVPSPERPRSTTPRAAPVLSRMVEAQALFDSKGSMNQSPRSPPAETQEEQSQEQTSASPLSLRLMEMFGFESPEKVLVEYACSLVQSMLLQGYMYVTEGHICFYAYLPRKSTVAIKSGYLYKRGRKNPKYNRYWFSLKGDVLSYYADPSNLYFPSGHIDLRYGISASLSEPKEKDREARDFQVTTDQRTYYFRADSSTSAKEWVKSLQKVIFRTHNDGDSVKISFPIESIIDIEESPMVDFAETFKIRAIESGETYAIDEYYFSFFNDGQDAFNFVKGLVSESQAKNPSRESPQPGRTTPQSRARGSRARWSLTSGLSQVLGSSDARRRRSASASQFSPGRDAAGLSPTSRQRDLSESFVNSFDQATESSTVLQSMTDTAESASQILNRSDVFQYPAMQPFRRQSLSEDQFGRRHSDETARSTNDIARLGPGITPRDVQRFYPPSDSDHDAQDAARVQQSASSLNELVRAGAYPLQRAAGLAEYLRNRSKQMGTLLASESMGYIEKVSGMWAGGRRHYGEAEGILPDDQDVDPEDKEDGCNHGDRFRAHFALPPTEKLQATYFAYLHRVLPLYGKIYVSQKKLCFRSLLPGTRTKMILPLKDVENVEKEKGFRFGYHGLVVIIRGHEELFFEFNAADVRDDCAVTIHQHLESVRFLSESGMLAEQEQDESEAAKAEHRMLQEARKDASGGLIPQTPSDESPEIHPIFDDPRASIINFKPTESLRITCLTIGSRGDVQPYIALCKGLLAEGHRPKIATHAEFEPWIRKHGIDFAPVEGDPAELMRICVENGMFTYSFLKEASMKFRGWIDDLLSSAWRSCQDSDLLIESPSAMAGIHIAEALRIPYFRAFTMPWTRTRAYPHAFAVPEHKMGGAYNYITYVMFDNVFWKAIAGQVNRWRQSELGLKATNLDKMQPNKVPFLYNYSPSVVVPPLDYPDWIRITGYWFLSEASDWTPPADLMAFIQRARDDGKKLVYIGFGSIVVSDPSALTRTVVESVQKADVRCILSKGWSDRLGDPASVKSEIPLPPEIFQIQAAPHDWLFSQIDAAAHHGGAGTTGASLRAGVPTIVKPFFGDQFFFGTRVEDLGVGICLKRLNVSLFSRALWEATHSERMIVKARNLGQQIRSEDGVATAIQAIYRDLEYAKTLARQRSIVSSTPFSPTPSAKTVAEQEVDDDVTDSEEWTFIGDETDIDISRRVRGRAVSDVDMLPEPLAVRSPELAQ

SEQ ID NO: 7668 - protein, 1451 aa, Xylaria hypoxylon
MASHPEEDAVRRRVSRKILKQNREGRRPTMDFPDRFKDLGDDKDEDVVPRSQGPNMFMNMNQSIFGVIAAAGSTTNFIDRFEGQSSDEDGNDDDSDDNTKGERKGKGKQREQVAKTTILKKSLSSEEKNTSGGEKRQGTYGQLLQSLPQLPRLPTRPQSKRSKLKPFQPSDTSENANGGASTSPTAEFQTSVIEANVGDREVQPAPVMSRMLEARAEMSSRPSFDLEGGLSRDQQNEGDQTGPSALARKLKEIFEFDHLEEVMEEYPCWLLQSVLLQGYLYITSRHICFYAYLPRKAQEVAKSGYLAKSGKRNPKYNRYWFRLKGDVLAYYRNASNLYFPHGQIDLRYAISANVTDKDQDAVHFSVVTHHRTYHFRADSAPSAKEWVKSLQRVIFRSHNEGDSIKISLPIDNILDVEDSHMIEFADTCKVRVIDNDETYSIDEYFFSFFSFGNEAINVLKALVEDASRRHSEDSGQNTTHRVAVGAKSTSASKDRSSFAGEPRSLNIRENVKATLSPRSSRTRRDSSPRFSGDVTRNEFHQPGRESRGLDHPTGVNRSRGSFSRRRSLSKSHQYDSAASQELHESSDSYVQSLEDHSMSGLVASSNEDPSGSQILRGSEVFHRPIIRHSDSISRASPNQLSGKAPLEEQLVEMSHQPHHAMTTGHIDDYASGDRPDRATTPTLQNLAKMGTYPLQRAGVFANYLNQTSRRMSNLLATESMGYVEKVSGMWKGGRKHYHESPGLQIDNGADDEENSTDGKHTMAMERFRAHFALPETEKLQATYFGFLIRVLPLYGKIYISDRHFCFRSLLPGTRTKLILPLKDIETADKEMGFRFGYSGLVVVIRGHEELFFEFSQVDVRDDCAVTLLQSLETTRYLLEAGLPEDDLLEEGDEALAERDALNEARLLEGNEHELKMPQEASGLSDSSPTILFDDPKASFLNFKPPESLKIACLTIGSRGDVQPYIALCKGLIAEGHKPRIATHSEFRDWIEGHGIEFAPVAGDPGELLRVCIDNGTFTWAFLREANSHFRPWLDGLLESAYTACQGADLLIESPSAMAGIHIAEALNIPYFRAFTMPWTRTRAYPHAFIVPEHKMGGAYNYITYVMFDNVFWKATANQVNRWRNSTLGLPNTNLEKIQPNKVPFLYNFSPAVVAPPLDYSDWIRVTGYWFLDEGLDWTPPDDLREFIEKARRDGKKLVYVGFGSIMVPDPARMTKEVIDAVLKADVRCILSKGWSDRLDKARASVPEHVLPPEIFQIKSAPHDWLFRQIDAAAHHGGSGTTGASLRAGIPTIIRPFFGDQFFFGGRVEDLGVGICLKKWGANSFAKALWEATHSDRMIVKARVLGETIRKEDGVNSAIQSIYRDLEYAKSLVAAKAGKNAATAGSPDDTVGDDESEEESWTFVGGDEMDPDLAVKKGVLAEMEANVNANGMFGTGTTGTTGTTRTTATIEP

SEQ ID NO: 7669 - protein, 1433 aa, Aspergillus udagawae
MRPFLDDAKRRVDRKLSASRQSLSTSRLLPSALPDRLKDNHDAQVDFTAPPRGSSSREGHLQYMQQSIFGMIAAVGSRSDFHARFDESSDSDGETEQGTRKESSVRKGTSASANIPSLDSSQRSSSRTDGKPEKESGTRGRRHRRTISDHKLIRPFKSSSRQEPQTDPSTGDEMPSVSPSTRPRSATPRAAPILSRMVEAQAQFDLKASSTERSQSSSQESGDKGPRDASVSPLSTRLMDMFGFDKPEKVLVEYACSLLQSMLLQGYMYVTEGHICFYAYLPKKSTVAIKSGYLYKRGRKNPKYSRYWFSLKGDVLSYYADPSNLYFPSGHVDLRYGISASLSDPKEKGTEPRDFQVTTDQRTYYFRADSSMSAKEWVKALQKVIFRTHNEGESVKISFPIESIIDIEESPMVDFAETFKIRVIEDDDSYAIDEVCLSITNILHEAHGLQYFFTFFNSGREAFQFLRSLINDQSLKNYSQHLSPQPDRSLRSDRTRKSRNRWSLTSGTTRIQGNGRSETQRKRSASASHLSLAHDVIESSPATRHQDSSDSILTSFEQGTESSAAWQSMTDAAESASQILNRSDVFQSPTIHGLDRRPSGGERRVRRNSDETARSLSTRANVGTGQQIDELGRRMDGNASGREARDSTGESDQVTQDPTKSFSAAPSLNELVKAGVYPLQRAAGLAEYLRTRSKQMSNLLASESMGYIEKVSGMWTGGRKHYGEAEDVLPDDQDVDPEDKEDGCNYGDRFRAHFALPPTEKLQATYFAYLHRVLPLYGKIYVSQKKLCFRSLIPGTRTKMILPLRDIENVEKEKGFRFGYHGLVIIIRGHEELFFEFRTSDARDDCAVTLHQHLEAVKFMAESGLLAEQEQNESEAAMAEHRMLQEARFDDYGENDLRPLNESSELHPIFDDPRASIVNFKPAESLRITCLTIGSRGDVQPYIALCKGLLAEGHRPKIATHAEFEPWVRRHGIDFAPVEGDPAELMRICVENGMFTYSFLKEASQKFRGWIDDLLSSAWASCQDSDLLIESPSAMAGIHIAEALRIPYFRAFTMPWSRTRAYPHAFAVPEHRMGGAYNYITYVMFDNVFWKAIAGQVNRWRKNELGLKATTLDKMQPNKVPFLYNYSPSVVPPPLDYPDWIRITGYWFLNEGSGWTPPTALSEFIQRAREDGKKIVYIGFGSIVVSDPSALTKTVIESVQKADVRCILSKGWSDRLGDPTSAKPEVPLPPEIFQIQAAPHDWLFSHIDAAVHHGGAGTTGASLRAGVPTIVKPFFGDQFFFGSRVEDLGVGICMKKLNVSVFSRMLWEATHSERMIIRARDLGARIRSEDGVATAIQAIYRDLEYAKTLARQRSIASSTPFSPTPSAKTTAEQDADDDVEDSEEWTFVGDDTDMEMSKRQRDRAISDADMLPDRLLANPNPGDSGPGRKLSDR

SEQ ID NO: 7670 - protein, 1211 aa, Komagataella phaffii
MSQLRPRDSSAGKSSSPRRTDRNPESIDVNSKGGSEGMTSGLVPGTAPHKEDETEAEDDIDCGRLITSKSLATMLTTASMYAGVSQLDDDAIESSALDEPIPYVPYEEDAESVMSESTVGVDTVRDTDSSEQINPEIDGLVALRKKQQHTLSKFELSVVRKRCSQLSLAGSSSGSTRRNSFTLDNNETTRAVKLCEKLKTTFDLSDDDEFVNDYPCWLLHEVFLQGHIYITSRYLLYFAFLPKRDSTVTMSGALSIRSSTTMRFSVRRWAVLKGNYFRLYANSTERYFPSLNIDLRFLLKVELSNPNLEENKPTVFKLITEARTHYFQADSLDNARSWVTDLRKHIFTAKNSGGHVTIKVPLENILDLSIETLFEASQTLKLKVLESEESYAIDDYYFMFFNNGDQVLDSIRQSMKALGIELTDSDSSESDSDVSGSETNGRSTHRKSKLSRSLSVLTPIPRGIGSIYKPIKSSASGIIGAIKKPQKSATRPFSSVVETVVPNDNDSELKQDHAGDAPKDSEEPSTKPSNWSAKSLVQGFLSTTSSISQSMLFASPMHYNNQLFIERGEEDPYFVTNKEEREVAQSRFRKHFSLPDSEELLASYFCHFQKNIPVYGKVYLGTTCICYRSLFPGTNTTMILPYSDIENVYNLKGFRFGYSGLVIVIRAHEELFFEFGSNESRDDCDLFLLKQLDFTKSHKNAHSEQKRKRNDSIKLAESVQLADARLRYFETRIESDIGREVPIILEENQYSTSEIRSKRRYKFVLLTIGSRGDVQPYISLAKGLLAENHKVKIVTHEEFKPWVESYGIEFATIAGNPAELMSLMVTHKSLSVGFLKEAKEKFTGWIGELLQSSWDACQDADVLIESPSAMAGIHIAEKLQIPYFRAFTMPWTRTRAYPHAFVVPEQKRGGSYNYLTHIIFENVFWKGISGEVNKWREQVLMLPKTNLERLEQNKVPFLYNVSPTVFPPSMDFPHWVKVVGYWFLDEGEADSYDPPKPLLEFMEKAKTDGKKLVYIGFGSIVVSDPKQLTEAVIDAVLSADVRCILNKGWSDRLGKQTGVEVELPEEIYNSGNVPHDWLFGKIDASVHHGGSGTTGATLRAGIPTIIKPFFGDQFFYANRVEDIGVGIGLRKLNSKSLSKAIKEVTTNTRIIEKAKEIGKQIQSENGVSAAIRCLYQEMEYAKKLSKSKQKYWDNQSEDISDDSVSGSWFEV

SEQ ID NO: 7671 - protein, 1300 aa, Hypholoma sublateritium
MRAGTQTLIQALQALPWMNADNDEDGPTYPGSPGSADSESDDEERPPCKLLVSRLSSSIHTIHRPLARSHRINIPNASRTSFQQPVPEEESLEDLSPSDEEQDNDFEETPRLPVEVPSQLSQQVIARDTSRQALPPPGLRERQNSMATVRLHRRARLAEKLREVYDLEDIGEYMLEMPCWLLRSVLLQGYMYLTNSYLCFFAHMPSREDQILKSGSLNKKAQRTKRWIKHWFVLKNDALSWYQSSSDPYFPHGILDLRYAISCDPSGEKDMRLRTNSRTIVLSADSVPSREEWVKAIRKVIFKAQNMGDSIAIPYAAILDVERSTAMDFSETIEVKVVDKEDNFSVDSYFFAYFQDLPGGLDQIRDAVRSHRAQSSAVESRSPPVVLDTTVPKSFLTNERSNTNVQDAAKPTSGFRLSSFFRPFSDTSAIRGSSLPAPSDIQSEEYTHISRKPNSVSFVPVASPEATTSPLPQQLSESSDIPTGQSTQFLPVTDHTYPPSTSNSSILPNISSLSRDSSGSWAVGVPSWLKTPRKAFTGSSTADSSSVLNTTPVKEIYSSPISSPGPASRSSGMGDMAFSVLESPDMFPDQEATDKFRAAFAYDAKETLLGYFPGYIYRVIPISGKLYISSNYFCFKSSALTVRTRMALPLRDVLACEKSKAGRFGHHGMIIIVKGHEELFFEFGSEERRNAFVSLLERQLEDTRRRIGSGEMVATSSGKRDALILEEFDARHSSTDSESALPTDNMADSLPAVMFTSASSTFLTFKPRKALHFTFLTIGSRGDVQPYIALSKGLMLDGHKCKIATHGEFREWIESHGIEFGYVGGDPAELMRICIENGTFTVSFLKEGLLKFRGWLDDLLKTSWEACQGTDVLIESPSAMGGYHIAEALGIPYFRAFTMTWTRTRAYPHAFAVPEHKLGGSYNYMSYVMFDQVFWRATAGQINRWRRNLLHLGPTSLDKMEPHKIPFLYNFSPHVVPPPLDWPEWIRVTGYWFLDDAEVSASKWTPPASLVQFIDNARATNRKVVYIGFGSIVVPDPKAMTQCVIEAVLSSGVHAILSKGWSDRLQVKSNDPTDVEEPLPLQIYPISSIPHDWLFQRIDAACHHGGAGTTGASLRAGIPTIIRPFFGDQFFWADRVEALGVGTGVRKLTVSALSDALVSATTDPKQIARAKTIGAEIKGENGVTTAIESIYRDLDYARSLVKRHLTEDEDDEEGTAEDSTIRHRDNVSPSSPSGYSSEGSHRGTPSEDWSVISDPEDRRLSLGSQPSERQAASKRTSFGAAAISILPDLFVAGSSVTRNA

SEQ ID NO: 7672 - protein, 1552 aa, Friedmanniomyces endolithicus
MTRPRYHCSSDVDGHAKIQFVALGNGVWLDEIRRQGNADIKDVPGGSVTFATLGARLFAADCTDAIGMAFKAGHDFPESIVDIFRSWSIDLAVQWLRDSPASRGLVVYEKGNNNRKGFQRLTEPLPVTVAELQGTTLLATSAFEFFGSAEYIDDQGADIVSLRQQLGGDHASTQPFIVWEPHPKSCLPDTLSKHQHVARLVNVFSPNHEELHSFFGEPTADVDPMVIEAQAQSFVDAGIGPHGDGCIVVRAAGHGCMVLSRHRSACWLPPFYPADSDNVVDATGAGNAFLGAFAIGWQKTESYIEAAAYGTVAASFALEQVGLPMKSGEGDGELWNGCGVEDRLAEYRQRIRGKSLEDIHKVRDQRHVSMDVPERFQGEDNEEDVTGIAEDSPGYAQQSLYGLIGATHSKSGLHMQGHFHPDSGSESGGETETEGSGRPDRISSTAAGQPSDSRSNLDEQRQSPKPDSSRHRKNKSEGKGLRSFLRPIRERSDSQPPDIMTHSGFLPARGKATREPDRPASAGGMRSDAPLLDRKLHARARAEMDASTTSTSSRRGKDGSSSESTKMKATAVDLPVAVAEIFGFGEPEDIIAEYPCWYLQSVLLQGYLYITKKHVCFYAYMQKKGHATIKSGQLAKQGKRNPRYRRYWFALKGDVLSYYTNAADPYFPSGTVDLRYGVSADLVPEKGHDKSKDSALFTVTTDNRTYHFRADSTASAKEWVKQLQKVIFRSHNDGDSIKISLPLENVVDVESSPLNDMAETIRLRVIDNDQTYSVDEYFFTFFSHGKDALHLLHVLTADNENRKAPLDIADDDGQGKRGLSYLGSSPKDYYTKFSGAMAGGKRHYTEADGLAPESHIEDPEEDLDTVEHERRFQQHFALPESERLLAVYYCSLHRVLPLYGKAYVGTRNFCFRSLLYGTRTKMVIPFKNILNLEKEKGFRWGYPGMVVVIKGHGGLFFDFSSNGLRDDCVVTVLRTLEAVRALQESVILTPHEKKDADAAAAENKLLSGVRKDVHAERDADPSEILSRIESGTPMIFDDPNASILDFKPTKAMRITCLTIGSRGDIQPYIALCKGLLADGQHPRIATHREFQGWVEKHGIEFAPVEGDPAELMRVCVENGMFTPRFLYQATSQFRDWFDGLLTSSYEACKGSDLIIESPSAMAGIHIAEALSIPYFRAFTMPWTRTRAYPHAFAVPSHKQGGAYNYMSYAFFDNLFWQISASQINSWRRKHLGLKPTSLEKLQPNKVPFLYNFSPSVVVPPLDFSDWVRVTGYWFLDEGTAWTPPADLQAFIDKARADKQKLVYIGFGSVTVSDSRELTQHVVDAVLKADVRCILSKGWSDHFDKKDASVPEVPLPPSVFQIRSAPHDWLFQQIDAAVHHGGAGTTGASLRAGVPTIIKPFFGDQYFFATRVEDLGVGIHLRKITVNALGKALWIATHDDRMQGKARLMGEQIRNEDGVATAITAIYRDLDYARTLIKKREVKIEGGGEVEDTEEAWTFVENDSDGDVARLGEPEVVWPASLLQAQQSWGGGGGHRKQASLGSMVLRGGQKTS

SEQ ID NO: 7673 - protein, 1581 aa, Thielaviopsis punctulata
MPSPLRSRSGDRSSSIRHIRNASKSLVRKRPASMKPTTTATTATTTAAAAAATSQFPARLQAADDDSGEEDLTAANKQTVNMAQSIFGLVAAVGSTGNFNPPFQEQSSDDEQDESHSPGLAKTAGLSPCFVSSSLDPSCRVSSHVASPSLVPSPSLQPSSSPHSPKSPKEPLNSPKSPADPHLSPKSPTNPSHRRKISESRLFRSLSAMPRFRKESSSKKRPSNNSSSSSAAAESDANDANDADVDSEPAPVMSRILDGRAEMAARASFDIEGMMGTQSPPTAAVGEASTRPTEAPTQLPAEASTSLAPFDGNTSSSASSPSTLAQKLKDIFEFDEPEEVIKEYPCWLLQSVLLQGFMYITARHICFYAYLPKKTDKVVKAGFLGKSGRRNPKYHRYHFRLKGHQLTYHETPTDLYFQSGLIDLSYGISAMITDKDKDGTHFNVVTHDRTFHFKADSPASARDWVHSLQRVIFQSHNNGDSVKISLPIENVIDVEDTQMLDFAETVKIRVIDNDDTFAIDEYFFSFFRNSKEALDLLRCYCEKAQSKNREALASANDASSNLSPGHSPGLKPSTVSGVQSPDSSGSRAPTPSGHRHHNSLSVRTGKLPEPVKATLSPLQSPSRRRRSRDFQGAFGAQRSFSQSRTRRSVSSQRACVAGHGRHESTATSSSDVGMADLGSESRELGLGDRCTRPGERGSGSATTRERDARPIDLKASSDSYVRSLSVDESSMAMISSVEDVSLLNASATASQILHDSDVFRTLPTQNLELDGGGAGGLSQGRAEGNESPQQAGQTSTQAATEANQAQETTEANDDTSTLQGFARIGSVPLQRAGALADYLNRTSRKMSSLLASESMGYVEKVSGMWKGGRKHYSLELNAHGGGRPAVDEGVHEMDEDKIGSSNERFRAHFGLLETESLRATYFCYMMRVLPLYGKIYVSDHMFCFRSLLPGTRTKLILPLKDIETVDKEKGFRFGYSGLVLVIRGHEELFFEFGQAEVRDDCHFLMEESLEACKMHRSGCLDGEQEEGGKEEEEGEKEKETEELARTALAERDALQAERGAADNDAVAEADALQATTDAHSIPLLLFDESQPRPKPKPQTPLRITCLTIGSRGDVQPYIALCKGLLAEGHQPKIVTHAEFGPWVQSHGIDFAAISGDPAELMRLCIDNGMFTWTFLREATSMFRGWLDDLFASAWKGCQDSDVLIESPSAMAGIHIAEALQIPYFRAFTMPWTRTRAYPHAFAVPEHKMGGAYNYMTYVMFDNLFWKAIAFQVNRWRRSMLKLPSTTLEKLQANKVPFLYNFSPAVVAPPLDFSDWIRVTGYWFLNEGSGDSWTPPPDLQAFIDRARADGKKLVYVGFGSILVNDPGRMTQEVIDAVLGADVRCVLSKGWSERKTDSQTAAAAAAAGGAATSTKTPEPEIPSDIFVIKSAPHDWLFAQMDAAAHHGGSGTTGASLRAGIPTIIRPFFGDQFFFGSRVEDIGVGVCLKKWGAKSFGRALWTATRDERMRRKAAALGKSIRAERGVATAIQSLYRDMEYARGLIAAKTKRDGRREEEAEEGEEWTFVGTDEPDPEVVTQRLSEM

SEQ ID NO: 7674 - protein, 884 aa, Trichoderma reesei
MLLSRTRSNAAGHIAIDDGLKKQITSVGEDGRFELCFHDDAGSLATWCKNLQETSKRVQTNPCSVPGICRRKSTGGFCPPLNIAILIVGSRGDVQPFIPIAQLLSKPPYGHRVRICTHPAFKDFVESQGVEFFNIGGDPEALMSYMVRNPGLVPSRKSVRAGDIGKRRAEMWEIINRAWRGCIEAGDGMGDPVRATDVENVEDLFLADAIIANPPSIAHIHCAEKLGVPLHMVFTMPFSPTTAFPHPLASMNYSGADAKTANYLSFIMMELLMWQGLGDLINKFRRQKLGLDPISVMWGFQLLSRLRVPFTYLWPESLIPKPPDWGKHIEVVGYSFLPLAKSYTPPPDLTAFLEKGPRPIYIGFGSIVVEDPDAFSELLFKAVKIAGVRAIISRGWSGVGDKCRITEDVYLIDNCPHDWLFQHVSAVVHHGGAGTTAAGIAAGRPTVIVPFFGDQPFWGQMIARSGAGPDPIPFKSLTAENLAESISVALTPSVQEAAKRMAEDIADENGAEAMAKSFQEQIGLDQFECEICPGRLATHRHKKTGTRLSGLAVACLVDRGVIQPAELELIRRKNWYVDEGAEHPLVGLAAAFTGPMGDVATATFDYSHALRYRPKHTKVEDRRPSWIDPWATDNSTNGSVGSNVASPNRRINPTTFSTREMELYAHKIARRSLKTNNADIDTLIRQPSLYDKQKAAWHARERGRNGQLFYLTRATGRYAVELTKVGLKAPVAFFYNIANGFHNYPSCGYAGVEVRRRDQIIDFETGLVAAAKEFTLGIWDAFSGVIILPYKSVHEEGAKGLGKGVWRGSKGFFSNLGASAFGLPGYALKGMEKELQKHHLTNCKAEMILIRLRQGIEAFRRATPQERDEVVRRWKARGCTQKQS

SEQ ID NO: 7675 - protein, 1424 aa, Fibroporia radiculosa
MSEEHDADTEGVSVGPAEKRSGDATESKSRFVKRAIEMTADKLTRSKSAGNKSQLSQSQPSLPAQTPSRILSLRNRGKGKEKSNGSSSPGEGDPSDFHSQLLPSPRLNERSSATYRRQMRPASSRSKDDDSPFITPRSPSLGPKRPELQTFRGTGSIRAGTQALIQALQAVPWTDYQDEEEYLAQDNAPLDSSSDEEDGSSGNRMASSIHTIHRPVARSKRGESTCSIARAPGLPRVPDNEELPRLEEQILSEEDIDDDFEPEQPGPINSQSLDIEDGQRTPSQSPEDTDMSPTHPARRSLNRSGSLSTVKIQRRTRLAEKLRDIFELDGIHEVISEMPCWLLRSVLLQGYMYLTDSYLCFFAHMPSKEDQVLKSGSLSKKAQRTKRWIRHWFVLKNDVLSWYQSPSDPYFPHGIVDLRYAITCESVGDKGIRLRTNQKSIRLSADSTPSRDEWVKALKRVMFKAQNMGDCVRIAIPYSAVADVDRSSAMDFSETIEVKVVDKGDQMAIDSYFFAYFRDLPLALEQIRDAVRMNRGISSDTLIPTVLDTTVSRPSASTSTPRTQSLPAPESTPKSSSGFRLPSLLRPLQEGLPLSRPGVTAERSDSEEFTHIAKRTTGSFMPITTSPISSMYSATERSRSPEGGAPSSEEVADESLSGSHHTYPPSPSPSPSLSELTVSPSRDSSISSWGVGVPSWLRMPSMPSRRTLTSAFGAYKTSPEQTISSTEGSAEGVSEVLSSNAGSGSRMSSGSGPVDFGYFSILETPETTLDVETVEQFRVSFAFDEKESLLGVFPGYIFRLLPVYGRLYISTHYFCFKSSGPLATRTRMVLPIGDVLSTEKTKAFRFGHHGLVLIVRGHEELFFEFADHERRDAFINLLERQIEDVHRRSQAGDPCRRDTLTVEESGPRSSFDNDNMASSALPAVMFNSTSSTFLTFKPKESLHFTFLTIGSRGDVQPYISLAKGLIKDGHRARIATHGEFKEWIESHGIEFGFVGGDPAELMRICVENGTFTVSFLKEGVMKFRGWIDDLLKTSWTACQNTDVLVESPSAMAGYHIAEALKIPYFRAFTMTWSRTRAYPHAFAVPDHKMGGNYNYMSYVLFDQVFWRGTAGQINRWRRNTLNLPGTSLDKMEPHKIPFLYNFSPVIVPRPLDWPEWIHVTGYWFLDDANVSSHKWTPPADLLDFLETARKAKKKVVYIGFGSIVVSDPKAMTRCVIEAIVRSGVYAILSKGWSDRLVKNVADAPEPEEPLPKQIYSVSSIPHDWLFQRVDAACHHGGAGTTGASLRAGIPTIIRPFFGDQFFWADRVEAMGIGSAVRKLTVESLTQALITATTDQRQIQRAKAVGEQIRNEDGAATAIEAIYRDLEYARSLVKRGPAVDTEDEDVDAERATIRDYPSSPERSGTRSASSSVSSARVSDWSVISE

SEQ ID NO: 7676 - protein, 1478 aa, Pestalotiopsis fici
MAPTPPDIRPSNEEATRRRVSKKLHKKRREEHQPTMELPDRLKETGDEVDEDVVPQQGGQQMFMNMNQSIFGLIAAAGSTVDFNDRFEEQYSDEDEAGDQRPEAKKAKGKEPEREDVATSQIPKKTSPEKAEKTDKKHRRRLSSQLLHSLPQLPRLSSKSRSRSSKLNSPSTELNAGLKDAAAHHGTFSEAGSSSLQSPNIEITGNDRDSRAAPVMSRMLEARAEMAARPSFDLERLSSDLRRGSDPGDNEDTELAVRLKEIFEFDQPEKVLEEYPCWLLQSVLLQGYMYITARHICFYAYLPKKAHEVAKSGYLSKSGKRNPKYNRYWFRLKGDVLGYYRDSSNLYFPSGQIDLRYAISANIVDKEKDGVHFSVVTEHRTYHFRADSAPSAKEWVKSLQRVIFRSHNDGDSVKISLPISNVVDIEETQMLEFADTIKIRVIDNEETFAIDEYLFSFFGFGKEAVNVLKILVEDAAEQQKEKQSELDVPGMQGRTGTSSDRSSLSASRTEAPSGELRSVKVRENVKATLAPASPSSHRESMSRGSGELSRGSFDGFRPFARRSLDMGSPTHGGSARRSFSGSRSQSRARTRITKVPQENPGSSDSYVQSLEDPSLSNMVASSSEDQTGSQILRDSQIFQRPTIYRRSTSGSRLKPIDDDASQPKEGLPSYRPRHAATTGYIAEPASDEKLHPAATTPTLQNIAKMGSYPLQRAGFFADYLNQTSRKMGSLLATESMGYVEKVSGMWKGGRKHYHDPNALRTDEEMDDEDDEGGQEATEVQLGKTMQRFRNHFALPETEKLRATFFGFMIRVLPLYGKIYVSDRYFCFRSLLPGTRTKLILPIRDIETCYKEKGFRFGYSGLVLVIRGHEELFFEFNQVEVRDDCNITMLKHLEAMRYLKDSEFAAKEDQEQVDDALAERNALNEARLKENTEHEVQLPQQASFLGDASPTILFDDPKASFLNFKPASSLKITCLTIGSRGDVQPYIALCKGLLAEGHKPRIATHAEFKDWVEGHGIEFAPVAGDPGELMRLCIQNGTFTFAFLKEANTTFRSWLDELLVSAYEGVKGSDVLIESPSTMAGIHVAEALQIPYFRAFTMPWTRTRAYPHAFIVPNNKMGGAYNYMTYVMFDTVFWKAMAGQVNRWRKTTLGLPPTNLEKMAQNKVPFLYNFSPSVVAPPLDFSDWIRVTGYWFLNEGTDWTPPDDLRQFIEQARKDGKKLVYVGFGSIVVSDPAKMTQEVIDAVLKADVRCVLSKGWSDRMGSESSVPEPELPPEIFQIKSAPHDWLFTQMDAAAHHGGSGTTGASLRAGIPTIIRPFFGDQFFYGARVEDLGVGICLKKWGVASFARALWEACNSDRIIVKARVLGEAIRKENGVDTAIQAIYRDLEYARSLVVAKAGKHQASKQSKEAVSDSVSEDEEEEESWTFVGNDDDFETEVIASKSALVEAEQLAKESSKSTSLASRIIGSTTTSNAAATSKA

SEQ ID NO: 7677 - protein, 1192 aa, Brettanomyces bruxellensis
  MOD_RES (968)..(968): Any amino acid
MLNVDFPSIQIGDNNVYDKSSNTNRDRRSRRDKQGKSRFSRLSFSPSHIWSSLSPVRGGKTGDKEAANQSEDVNTKASSDTGGLQSDIKSATRSRRTTDASTSILGISRSFAGFLTTASVYAGFEDLQEAQQEENEIIDSEAADYGGTKQSKNTIYSKSTASKSKLELSITIHKPLLSKEKARMFAEMLRQRFKIPDDCEFVSDYNCWLMGDVLLQGHLFITTQFVFFSAYLPKRQPEKIIQQGTLSVKSAILHRRWIILKEGTLSVFSHSNDLYFPDMVLDLKAALRAEIYHKSKKSGIGKEKTSESAPVWFKVLTPKKTYWFQADSMSSARSWVSAIKKQIFQSRNKGDQAIVKIPLRSILDFELTTVLGETKNLRIKVIENADSYAIDDYFLLLFSDGAKVAGDIRNVVDRAGVKLTDGRNEEECAQFVKRKAELMKEINEGIETSNCMIRDPESIQKETKKIKDESQLESVEVQSPNSATSSTFQRVSKAAASGISTITRNLSYKQQQIVHVGSEFVGDPFYILDKTAREKKQSGFLKAFSLHDQELRAIYHGYCLRGLPVYGKVFISTDYLCFQSSLPGSGTLMILPLTVLENASKEKGFRFGYCGLVVVIKGHEELFFEFSTEKARDDCECQLLRQKDRMRNNDKRRHRSYKGSHASTSTASHSNSPESSESAPTLTSARIKLVESKLNDEIGADVPILIEDNPLQRTVLKPLRHYRFTLLTIGSRGDVQPYIALGKALKKEGHSVRIVTHGEFEPWIKSHGLEFAPIAGDPSELMSLMVSHPTISYSFVREAKSKFSSWINELLDTSWKACQGTDVLIESPSSFSGIHIAEALGIAYFRAFTMPWSRTRAYPNAFMVPDQKLGGSYNYMTHVVFENGYWRGVSTQVNKWRENTLHIPRTTLAALKQNSVPFLYNMSPVVFPPSVDFPEWVKVTGYWFLNEGHDDYKPPEKLKSFIKDARRXHKKLVYIGFGSIVVEDPHKISSVITQAVLRAGVWCVLNKGWSERGKSKRNSQRTDSSENPRDTSRKMDEFPPEILSIGSIPHDWLFPRIDAAVHHGGSGTTGASLKFGLPTVIKPFFGDQKFYANRVEDLGCGIALKELTVSSLASALKEITTNNRLMQKAEAIGSMIRKENGVQNAIAAIYSEMKYAKNLSLQKRRVSVADDDKVECKLDEVTSEDGESWLLV

SEQ ID NO: 7678 - protein, 1316 aa, Claviceps purpurea
MEEGPKQKEQHQSHGRTRQRPRQKVSNSTSDGAESLVADGLMVASLETSSDDALPPAYGEHHNHIKFSQPGIDAGAEATGKNSLRRDPRVNGSNQWTSRSKRGGINTYANFEHLRPMLTDDGIPLALDDGRININICTKNRRLADLLAPEIDSRTFASPALPPAYIPPGLGAALGQPPLPVLNVVIQIVGSRGDVQPFLALGKVLKETYGHRIRIATHATFKSFVEENGLEFFNIGGDPAELMAFMVKHPGLMPGIDALKSGEITRRRRGIEQMLLGCWRSCIEAGDGMGPPPKQHRVNAPLDFSQSLPGDERARPFVADAIIANPPSFAHIHIAEKMDTMTWQGLGDIINRFRKRALELPALSFVWAPGSLNRLKIPYTYCWSPALIPKPNDWGAHIDVSGFCFLDLASSYIPDPDLAAFLEAGPPPVYIGFGSIVVEDPNFLTQMIFEAIRLAGIRALVSKGWGGLGAEDRGNPESVFMLGNVPHDWLFERVSAVVHHGGAGTTATGIKAGKPTLVVPFFGDQPFWGAMIAKANAGPEPILYKDLTAEKLAEAIKICLEPNTLARAAELGTKIRKEAGTDVGARSFHRHMDIGNMRCSLAPSRVATWRVRRTKVRLSPLAMSVLVDAGLLEYKDVKLCRHVEYNTEDQPSDPVTAGAIAIIGDMSDIGLAIADVPRKLFQTRRIKDPQGFEMRNVAKAPTEPTPASKGVVSQTASMKADVWNKAVHRGDHSATVTADSNQPLLHHPSDPRPSHELLTNPTSATAFNKQTASAADCMAQSIIQSMTRSSVDKTQSAGLRREPSPSVVSLDTTIAAGQSLGRAVSTGVKVPMNFALGLAKGFRNMPRLYNDDTVRPSGKVTDLTSGIRLAGKELGLGFFDGITGLVTQPIRGAGKEGASGFVKGIGKGIGGLIAKPAAGIYGVPAYMMQGVHAEVSKMFSTSFTNYVITSRIVQGDQDRVGAGEEEKAEIIIRWNNIKPDLKHFHVLKRTERKKAQKAKMGAAVPSHTPVFPSSQLKAPWPHGQNLPSEGKQKLVARERDSSSSTIAIAASNEFGVTPSLVSGDVDYETAIQASVRETSRGDREEDAVIEAAIRKSIEAMRAHARARDVLLDPLLNASELLVKDASIFHDEEYRISDEEYQDLIERAVQQSLASQILDYDSDQDFGTTAAGTSTSAAGLASDGVQEGFQHGADIRRAIDDSNNIEYLLHEDYEASLQQAIELSKQDLDCYQTRRNEEDIVLEYMKKQSLAEKEYRQNMDEHREKWVVYNGGGDEDEELRRALKATEVSSKLHMGNDTGTSVRDANNEDQTVGTGSE

SEQ ID NO: 7679 - protein, 852 aa, Rhizoctonia solani
METYPSDARIRRSTASHYSQSHRNQSRTLSIDTPSFSSYNATLSRAQDDYNARELENSSLPYYRYGSMPHESRSPHSQRESVYSKPDEETLVGSVTSFDTVHPTLGHHPELGVEASFHNNGRLSMVFNHRFDKPLPEIYNAPVQEVGIDEAGFAHAPPMSVNIMIVGSRGDVQPYVALGQRLQKYGHTVRLSTHETFRKLVKDAGLRFYNIGGDPQELMSYMVRNPGLIPGFKSMTNGDIGKKQKMVAEILEGCYQSCIGPDDDTKAIFVADAIISNPPTFAHIHCAEALGIPLLLSFTMPWCPTTAFPHPLVNVLQRGSTEANVLNYYSYGLVDLMTWQGLGRTINKFRTRRLGLQYLSSTSAVGMIERCNIPWTYCLSPALVPKPTDWMNHIDLVGFYFLDLAKDYQPPQDLVDFLNAGPPPIYIGFGSIVLDNPMRITETILAGVAQAGVRAIISPGWGGLDENMIKSAGQHVFALGNVPHDWLFQYVSAVCHHGGAGTTAAGLKCGKPTIIVPFFGDQPWWAAQIARRGAGPSPLDHKKLTSDIFASAVQVALSPSSLGAAREVGKMIMREDGAEKGVESFHRHLPLLNMRCDLTPNRVAVWYSAKYKLRLSVFAAQVLAEAKHIKLKKLKLHRSREYNPYVEAVDPVTGTVIPALRSLNNMGRGLVKVPTKPGKGIAQFTRASVRGVQGTLQGAAEGISNMPKLYGSEVREHKRVTGIGSGIAQGTKGLVLGVYDGISDFVTEPVKGLKNDGFYGAIGGLGVGTLNLVTKPVGGALQFVSMPMEGTAISFSHKEIEKDRIVARQAEGIVASERASLQERSAVIEAFVEYKAKRKRDKKGKNKCKTAA

SEQ ID NO: 7680 - protein, 1473 aa, Sporisorium reilianum
MGLRPLFGSRASVNNVRDSFGTTVEQVKSSESEHADPLNQAASNQAVSAEQPHQPQDRQGLAGLLNAAALVSDKDAQSTTEDHHDHDDLVAAQPQHTPQPVALDASHDDAAAWKQSRTEAETSDQRESARASSKFGRTLKKFDAKIRTKIGVNPPPTAQEIKSPYSIGNDEHLTSHNHEGAAELLNDAQLETLQHLSDDDADDDDDDDQDEEEDDDQDHQDHDATQPDAASIQKHVDELERTKKDAEKRRSGSMDGARPGDTVRTHAPAQVSAEDKMKAIIEEFGECPSLSQPNEPEKLLVDHNGVLMKTVLIKGSLFLTNRRLCFLAYIPNAARGGSEHDTPSNTDSAPGGMRAPHDPNVQNPILKSGPAVIHRPGKMRAKRRVWIELRRHSFNAYAASNKLYKPLLSARLSNLSAVLPIDWAHPNVIRFVDGSKDSSVEFKTQEAALDWRKELEAAAFHSRNTSDKVRISIPLERIVGLGAADFMQVAKVIHVDLIVGAVSESEQAQFVQEHRERAERRQLDHSWSGNDVFYNCPKDPGFKCHTTQVAFGITHNRIAFLDLLREAIKKPQTLHKSAGFRQTLQAVPAPLLDLDTDADAEETSTDGNSSSDDQKLSLAEKFCRAFGLPDHAEQLHIVKAELVRTLHTHGTLAIGLDYLLFWRRAVSRDLKVKVPLNDLQGVDTYRSMLWHHFGLVVHIRAHSDMFFDFTSKQNRDLVLSTLKRVVEAKQTHKDDAERASVNTASDGSHATKVEAGDASAKAGGKPPASVLLNDSVGEVPVFEPEVLSYLPRVVNLDRDTMRNALRVSPMRIYCLTIGSRGDVQPYIALCKALKQHGHTPVIVSHPEYRGWVEGHGIEYRGVGGDPAALMKLSVEHRIFSPAFFKESIGKFRVWLDELLRECWEECQGADLLIESPSTMAGIHVAEGLGIPYFRAFTMPWTKTSAYPQAFSVPSIEMGPSYNSSSYTLFDQIMWVATSGQINRWRKHMVGIGPTDWSKLDAGSVPFIYNFSPAVVPMPNDWGDRVKISGYWFLDNPENNWTPPKEMSDFLERARKDGKKIAYIGFGSITIENAEEVSGNIMQAVRSADVRAIVAKGWSGRGGSKPKKKKPHMQHHNSSLSHTDAEDTATEDEQHEVEIPDDVFVVDSVPHDWLFPQIDIAMHHGGAGTTGASLRAGLVTLIKPFFGDQFFWANRVQKLGAGARVNGLSVSDLTDSLKSAASDRVMVEKAQGVGEKIRSEDGVSIAIEFLYKNISLANRRTQRRLEREATAHPASPSDAQCSNPLSRLASHGRQNSGERHPHRAASLPTESLSPSPLSPSQEAGLHRSTSTIVESPAGEDGDTPTGGTDSPTKTGKSLLPSMSTLNMLPSSMAASLKEMVTLNHNTNDTTADGEEAPGSGLGDRSRTAPSGALVGEETEEQKMARLKGYKNAKAEDIRRRKLLLERLEREKRKKVEQQRKEAAEKKADAAGVQA

SEQ ID NO: 7681 - protein, 409 aa, Streptomyces yokosukanensis
MTAGSRGDVAPYTGLGHRLALSGHEVTLVTHARFAPLVAGSGVRFHGLPVDPLAELESPRGRGLHRSASEAGKLIRLAGMARRVVGRMTEDLITAARDSEVLLLSASLAPLGHTIAEGLRLPSMGVYLQPIAGTREFAPPVLGGGSWGPAVNRVAGDGVCLATEHIFTGALPGVRRRLGLPAVRAGATLRTRERRLWPVHHGFSPLVVPRPRDWRAGLTVSGYWWPYDAASQLPDSVRDFIDSGQPPVYVGLGSATVPDAGRLSARLVAALRRAGLRGVIQRGWGGLTADGDDMLAIGDVPHALLFPRMAAVVHHAGAGTTAAGLRAGVPAVPVPVQFDAGFWSARLVALGVAPDVVPLRRLTVQALASALVRATREPVYRERARSLGARIRAEDGAAPVLAALDRLGD

SEQ ID NO: 7682 - protein, 500 aa, Colletotrichum fructicola
MGNQDRETFDSSRASKASAYGLEDLYIEDEPSTSQPPQTPPAYTPEYTPQKMFPMPLNIVIQVVGSRGDVQPFLALAATLLKSGHRVRIATHPQFSSFVLANPNLEFFPVGGDPADLMAYMVESPSLIPKVSQIRAGIIQRKRDMYTEMLDGFWRSCVHPDPLTNVPFVADAIIANPPSFAHVHCAQALGIPVHLMFTMPWSSTKAFPHPLANVGYSKEDKKSTNFASYAAVEFLTWQGLGDLVNAWRVASLGLEPVPSTEGHRLLEVLQVPFTYCWSPSLVPKPSDWGSHIDISGFFFRDPAPYTPDTDLEAFLRAGPPPIYVGFGSIVVGGIEGLMTMVLSAIKATGVRAIISRGWSNLTGEESSDVFYVGDCPHEWLFQQVAAVVHHGGAGTTACGLRYGKPTTIVPFFGDQPFWGAVIAKAGAGPDPIPYRSLTSQKLIHAIRYCLSPDAVTAARQLAESMEKENGVQSAVDSFHKHLPQPKMQCDFFPDQPAALM

SEQ ID NO: 7683 - protein, 1190 aa, Saccharomyces eubayanus
MPITQIISASDGEAGSKPTISLVLDNLSKLEKLSPRHHRLSKSLSKIKRWRNRSNSGSSMDSSEEQDKLGEAYNDNDNADDLAKSKYMMKSIAGLLTTASVYAGMNTAQEVSALAQDDFQELGSSGLSQANLGKNEVKSKKENSKRKSGPDVPRVDKRNPTLFDFSVTRGKISKDSISKLRQRFHLDEQEPFLNDFPAWLLKDVLVQGHIFITMKHFLFFAYLPKNPRSVKMSGNLNIRTKLIRSTRYWCVLKNHLFSMYTSSTELYFPVLTIDLRETQKIEIEKHSLNGNTTKTFKLSTNESTFKFNADSEFSAKSWVNALKKEQFAAQNSEDNSISLKIPLPNIIEIDDQPIVNKALTLRLRALESSQTYAIDDFMFVFMDGSGSQVEDSLCQQLALLQKSGVSTLYNDTSAKNVKSGNQKGDLMTTEQENDDNKNSKYLNLLSSTVPSSENGKKSKSRFRERSNSWFRRAKPLEDSQVEDVEEIYKDIADDIDSSVYSTIQVPDQGDNQDQTVDWKPSHLRNFADMWAAKPIHYQNKYLEFGKDDTYLVKETEELSANERFRYHFKFNKEKSLISTYYTYLNRNVPVYGKIYVSSDTVCFRSLLPGSSTHMVLPLSDVETCYKEKGFRFGYFVLVVVIHGHEELFFEFSTEVARDDIERILLKLLDAVYAGSGEGSNASTTSIGDVQHNTDSAKLKLFEDKINAEGFEVPLMIDENPYYKTSITPNKSYKFGLLTIGSRGDVQPYIALAKGLIKEGHQVVIISHSEFRGFVESHELQFEEIAGNPVELMSLMVENESMNVKMLREASSKFRGWIDSLLQTSWEVCNRRKFDILIESPSAMVGIHITEALQIPYFRAFTMPWTRTRAYPHAFIVPDQKRGGNYNYLTHVLFENVFWKGISGQVNKWRVETLGLGKTNLFLLQQNNVPFLYNVSPTIFPPSIDFSEWVRVTGYWFLDDKNTFKPQPELENFISEARSEGKKLVYIGFGSIVVSNAKEMTQALVDAVVEADVYCILNKGWSERLDDVAAKKIEVGLPKNILNVESIPHDWLFPQVDAAVHHGGSGTTGASLRAGLPTIIKPFFGDQFFYAGRIEDIGVGIALKKLNSQSLAEALKVVTTNKTMKDRAELIKKKISKEDGIKTAISAIYNELEYARSVTLSKVKNPRKDENIVDPTKLPSAETTDEAWTMI

SEQ ID NO: 7684 - protein, 1293 aa, Pisolithus microcarpus
MRAGTQTLIQAIQALPWVDDPENDDDLGAASTPSVDSDEDSKRHVASSIHAIYRPVAWSRHMGSSVADRSAKQRSVQGEVSREVDSETELNMHFEEDVDADDFEATTPRPDDIRKHEVPLPTVAAELNASLRRRAASRTGSMATVKVSRRARLAEKLREIFDIDVLREVWAEMPCWLLRSVLLQGYMYLTNSHICFFAHMPSREDQILKSGSLSKKATRTKRWIKYWFVLKNDALSWCQSSSDPYFLNGIVDLRYVIACEPVGEKEMLLRTNQKNVLLSADSVPSRDEWVKAVRKVMFKAQNMGDTVKIAIPYSVILDVEKSTAMDFSETIEVKVMDKESSDSYFFAYFHDIQAALDHIRDAVRAHRALAPVSPQAVLDTTVKPPAGVAPGIDRARSLPTSDTKGATPFRLSLLLRPFHDTLPLPIGRMHSSPEPPNGADEYMHVSKRDTFIPITASPQSYSGNELASPATSNSTPSIPANNLTLVRDHTYPPTTSSIESSTPSPTRILPSGVPWNMGVPSWLRGARKTAGSSVSTTGVGSTPTTSQSLGGVREIYSAPWHSSSDQPLWAATELGYSVLETAEAVVDSETTEKFRTAFAFDDREALLGHFSGYLFRLLPVYGRLYVSSNYFCFKSSGPLTPKTKMILPIRDILNVEKSRATRFGHYGLTVVIKGHEELFFEFGVEDRRTAFVSVLERQMEDLRKRPSSNDVPKLSQGKRDALILEEFEARNSASSDADPVPPSEALSESLPAVMFTSASSTFLTFKPKESLHFTFLTVGSRGDVQPYIALAKGLIADGHRCKIATHGEFQAWIESHGIEFGYVGGDPAELMRICVENGTFTVSFLKEGLLKFRGWLDDLLKTSWEACQGTDVLVESPSAMGGYHIAEALRIPYFRAFTMTWTRTRAYPHAFAVPERKMGGGYNYMSYVMFDQVFWRAISGQINRWRRNLLHLENTSLDRMEPHKIPFLYNFSPTIVPPPLDWPEWIRVTGYWFLDDADVGVKKWAPPQNLISFIDTAHQAGRKVVYIGFGSIVVSDPRGMTRCIIEAIVQSGVYAILSKGWSDRLHTKTSEACEPEEPLPKQIYAISSIPHDWLFRRIDAVCHHGGAGTTGASLRAGIPTIIKPFFGDQFFWADRVEALGIGTSVRKLTVENLKDALVTATTDQKQIDRAKLVGEQIRSENGVATAIEAIYRDLDYARSLIKRPPNVEESEEPSTLESTGSRSRYDSGGSQRGSEDWSVISDPDETRASFGSRRSDSTSLKRNSLAAAVMSVLPDALTSSNHRRSNSASSRPP

SEQ ID NO: 7685 - protein, 1249 aa, Scheffersomyces stipitis
QQSILDNLNPQLIKEGLLMRPKEGQQTEANEKSRTDRLRLSIADKLQRVFDISDDDYFYGNYSAWLIRDVLLQGHLYLTRDSILFFAFLPKRYSVTSESESNYDDSNIVVQSGTLGLKTGKYGDSMFTTVLTHRYWAVLRSETLSIYSSSTDLYFPKVVIDLKTCIRAEIADKDRTEIVRGSSPPRTPRVGSGTATHSPISRRGSGDNSTDEEIEISNILAQESIAVSEDNFENASTGVWIKLITKKKNYKFFCDSLFSARQWCNNITKLIFQLNNSNAGNEVLLKIPIEDIVDYEKSKLFEEDSKDSNVPEDEIPVSMSFSKKLGAFDMSKKRSSSSASLNSDGQSSLDHIFFMFFRDGHSFYESLNAVILDHKNRLNEQSEASDSSDKFFEKAKKIPPQILSPTSSTNRIKKLGRTLSNPAKLLTISRRSSEDSANSERSLNDLDFISSPDLYVSNQQLNFPRPLTISGLKSMQMSFETSQKDPNEAESEFKKNEVKDFIDDEDEDKSLMAIGKSIKAFSKVGSKWSAFPAHFAEQDGIDDDFFVQNQEVRELTERHYQEHFSLNKEKKLVATYYAHLQRSIPVYGKVYLGDTDICFRSLLPGVQTKMILPLSEVVNCYREKGLKLTYSGLVIVVNGQHELFLEFSSQKSRDDCEFMILSQLEKLHGGETWAPSPHQWGSNYEMELTKTRLMTGVEDHPTEFSFSEQDLKRARTRIENARIKMFEDKFNAAAGLDVPIILEDSPLFKTEIKPSTSYNFTLLTIGSRGDVQPFIALGKGLMKEGHNVTIATHAEFEDWIVKHGMKFKLVSGNPAELMSLMVTHGSMSVGFLKEASSKFRGWINELLTSSWQACQGADILIESPAAMAGVHIAEALGIPYLRAFTMPWTRTRAYPHAFIVPDQKKGGSYNYLTHVMFETVFWRGISGQINKWRVKELGLPSTNLFRLQSTKIPFMYNVSPTIFPPAVDFPDWVKVTGYWFLDEGAAADYNPPEELIEFMELANEDGKKIVYIGFGSIVVKDANSLTRAIVEAVLDADVRCILNKGWSDRLSKNQSEPVELPPEIYDSGSIPHDWLFPRIDAAVHHGGSGTTGATLRCGLPTIIKPFFGDQFFYASRVEEIGVGVGLKNLNARSLSKAITKVISDLKLIERSKKVAEKIKRENGVMTAIETIYSELEYARNLILSKQQHNENYRLHMGTPSGIQSPNVEEDDEYTDTEKEEDEEDYTDESEDEGGDDYEAHEDNFSINNN

SEQ ID NO: 7686 - protein, 1423 aa, Neonectria ditissima
MAPPSDAGPVRPSVDDEDIKKRVSRRLHKKRREDRTSTVFPEPLRDSDDSAEEEDTPSQGPPQFMNMNQSIFGLIAAAGSRVDFNDRFDGISSDEEEGHETTQQGTPTDDLSKTSVLKVSSKDKSSRRKRLSGHKLLRSLPTLPKLLPKRRQSSRLSAPKEETEESSEASASGTSTPPTFTLTRHDSRQAPMMSRMLEAKAEMTSRPSFDVERASSDVGRSESTDLPPLAKKLMEIFEFDTPEQVIEEYPCWLLQSVLLQGYMYITSKHICFYAYLPKKAHDIAKTGYLMKSGKRNPKYNRYWFRLKGDVLAYYRDSTNLYFPHGQIDLRYGISSNITDTDKEGLHFSVVTHHRTYNFRADSAPSAKEWVKSLQRVIFRSHNDGDSVKISLPIVNVIDIEDTQMIQFADTCKVRVIDNDETYAIDEYFFSFFSFGKEAINVLRILIEDASGSRDEDKVLGRQEKASSLPPSRRSPPLAARHSIHLDKIRTGKLPEQVKATLSPMSPHSPGLSPRVSSDVPYRASLDAFRQIGRKSLDLSGVIREQSPRRSFSGTRRHRDGNQTPKQEQDSTDSFVQSSIEEPSLSILAASSNEDPSASQILRGSEVFHSPTMRRSASASRAADSKKPTPRNSSAQYVPHRVQHAATTGSLSTQPDSVDAQRPGTPTLQSITKIGAFPLQRANAFAEYLSKTSQRMGSLFATESMGYVEKVSGMWKGGHRHYDEPAGLRTDDDDLEEDADGKVQISMDRFRAHFALPETEKLQATYFGHILRVLPLYGKFYISDRSFCFRSLLPGTRTKLILPLKDIETVHKEKGFRFGYSGLVVVIRGHEELFFEFGQAEIRDDCAITLLQSLETTRYLEKSGLLDQEELEEENFAIEERDALKSARQDEFADHQLELPHHSSGVSNAPTILFDDPNCSSLAFKPQTSMKITCLTIGSRGDVQPYIALCKGLLAEGHKPRIATHGEFQGWIESHGIEFARVEGDPAELMRLCIENGTFTWSFLREANSTFRGWLDDLLDSSFKACEGSELLIESPSAMAGIHIAEKLGIPYFRAFTMPWTRTRAYPHAFIMPEHKMGGAYNYMTYVMFDNIFWKATAYQVNRWRNKTLGLPNTSLEKMQPNKVPFLYNFSPSVVAPPLDFSDWIRVTGYWFLDEGGEWEPPKELQDFITKARADGKKLVYVGFGSIIVNDPAKMTQEVIDAVQKADVRCILSKGWSDRISSKEDPSKPRAEEPAMPDAIHVIKSAPHDWLFRQIDAAAHHGGSGTTGASLRAGIPTIIRPFFGDQFFFASRVEDLGVGVWVKKWGTNSFGRALWEVTRNERMIVKARVLGEQIRSETGVDTAIQCIYRDLEYAKSLIKRKAGKNTEADPAEDDETEESWTFVGRDEPDPDHVTKKLSDGLMGPATSSEKSLGSQVMTSPAVAI

SEQ ID NO: 7687 - protein, 1229 aa, Spathaspora passalidarum
MRDNLPMESPQQKQYLRVQIANKLQRSFHLSEHEYFLGNYNSWLIKDVLLQGHVYLTSDSLLFFAFLQNKDMQNEESTNVAINDDSLSIIQSGTLGLKTMRYGDTLVSGMLTHRYWAVLRQDTMSIYSSSTELYFPLIVIDIKSCLYVEVSNKQKYEKEAVSPVGRGYAGYGISRQNSGTSTPRDSDDVSSDLRDLLQQEASEETVESSSSHVWIKLVTRKKTYRFQCDSLFVARKWCNNLTKLIFHHNNTNSNSEVLIKIPHSNIIEYNQFAIFSEDQDEEDKIEDEENDIPFGWNVKYYSNNESRSTRLKKKFTGEDESLETESIYFLFPKSGSNFFNEFEKIVQNNQQQVKKESSSELVRTLSETFKRSKQDDSRKQLGKSISTLTPSLNNLVQSVLNANGMDSDSILSQQSSEKSTAKKFGSTLVNATKIFAPKKSPSVIINESSDDNNDIPEPKNEQNNFCLPKNLSVGGLRSLDILLETSIKQMGEAITRYDTSNSAKSQEELFSTISRDSSQTKGGGYGPSAITKALTVFGSKLRPIPSHYQSFSDNDSYYIKQLKVRERDQNNYRETFALGEDCKLISSYNCYLQRSFPVYGEFFIGETEICFKSSLPGLSTKMIVPIFDIEAVKKEHGIRLAYSGIKIICKGREEMTLEFNLGSSRTDCYRVLCQQLNYTNDETNDSIDRHIDDTEASSMNGDNYHIPSSLEIARKRIEMARIKMFEDRLTTASGLDIPIMLEDSPFLKTEMKPSASYKITLLTIGSRGDVQPYIALGKGLIKEGHKVRIATHGEFGPWIKKHGLEFKEIAGDPGELMSFMVNHSSMSVSFLKDAQAKFGAWITKLLTTSWEACQGSDILIESPSAMAGIHIAEALVIPYFRAFTMPWTKTRAYPNPFFVPDQKKGGSYNYLTHVLFETVFWKGISSQVNKWREEELHLPRTNLYRLQQSRVPFLYNVSPCILPPAVDFPDWVKVTGYWFLNEGYGDYQPPSDLVGFMRKASEDKKKVIYVGFGSIVVKDAKSLTKAVVDAVVKADVRCILNKGWSDRLSKDKNEIEIELPKEIFNSGNIPHDWLFPRIDAAIHHGGSGTTGATVRAGCPSVIKPFFGDQFFYATQIEDLGVGLSLKKLTAKSLTKAIVSVTTDSAIIDKCKKLASKMSKEHGVLSAIEAIYSELEYSRNLSLIKDNHNINYKKHNPDFPARVGSPKSDSSGESVLTSDVKNSSFLSFAV

SEQ ID NO: 7688 - protein, 1419 aa, Rasamsonia emersonii
MPHPDDAGKSRLGFRLSTPSKSHRRMSSSRMPERLKDGDDAHEDVTAPPRDANGRDVHYMNQSIFSMIAAAGSKSDFHSRFDDSSDSDGGEAEKPEEESSRRPTSRSKPQKIEKPTLEVPDEDDKEEGEGSAEERGRGHRRRISDSKLMRSISKFHAKHSKGKESVDKSQPAARDKSVSPSPARLSGSMTPRSAPVLSRMIEAQSRYDPAASSTGTATSTEEGNGEKKSSESASTSLLATRLKEIFGFDRPEQVIGEYPCWLMQSALLQGYMYVTEGHLCFYAYLPQKSNTAVKTGYLAKRGRKNPKYSRYWFSLKGDVLSYYADPSKLYFPSGHVDLRYGISAALSDQKDKGNEVKDFTVTTDNRTYHFRADSAASAKEWVRALQKVIFRSHNEGGRVKISLPIENVIDIEENPMIDFAETFKIRVVDSGETYAIDEYFFSFFNYGKDAFNVLKNLINDTPAQRISQDPLATFGLKGSPESSRHRSRSADTHQRSSSSGPFVEAGAGDAGGVSVFNGRSAHSRTKSDSRSRRRSDVMSRASLAQSQQDRSLQEKQHDSSDSFVQSLGQGTESSVILQSTTDTAESASQILNRSDVFRSPTIHRLRSTPSASEDTARSGPRKVSVGDVAPPGYSLDELSSKRDQESQGAISESDHDAPSSSKVYATSTPTLQEIVRAGAYPLQRAAGFAEYIKSRSRQMSSLLASESMGYIEKVSGMWTGGGRHYAEGEGFHSERFLDQEDMEHSSSHGDRFRAHFALPSTEKLQATYYGYLHRVLPLYGKIYIGSTKFCFRSLLPGTRTKMILPIKEIENVEKEKGFRFGYQGLVVIIRGHEELFFEFNTSDARDDCAVTLHQSLEAVRFLVESSVLTQQENEEADAAKAEHQLLQEARQDILDEESQEVHPIFDDPRASIINFKPAESLRITCLTIGSRGDVQPYIALCKGLLAEGHRPKIATHAEFEPWVRKHGIDFAPVEGDPAELMRICVENGMFTYSFLKEASLKFRGWIDDLLSSAWKSCQDSDVLIESPSAMAGIHIAEALRIPYFRAFTMPWTRTRAYPHAFAVPEHRMGGAYNYITYVMFDNVFWKAISGQVNRWRKKELGLRGTNLDKMQPNKVPFLYNFSPSVVPPPLDYPDWIRVTGYWFLNEGADWTPPPELSEFIQRARQDGKKIVYIGFGSIVVSDPAALTKTVVESVQKADVRCILSKGWSDRLGDPTSTRPEITLPPEIHQIQAAPHDWLFTQIDAAAHHGGAGTTGASLRAGVPTIIKPFFGDQFFFGARVEDLGVGICMKKLNVSVFSRALWEATHSERMIVKARRLGEQIRKENGVANAIQAIYRDLEYATTLTRQRSAVSSTPFTPSGTDEKTVTEDDLEDIEETWTFVDDVTDPDLSKKGRGMDHENSGGQSQDRSQTRPADTSLA

SEQ ID NO: 7689 - protein, 599 aa, Uncinocarpus reesii
MLKTFWRVCELLAQQETDHGDDSGPEAYEHDDDETFPPEAAAAKLLDSGLDHGLETSQPSDPSAQEPAPFNFDDPYASIVNFKPSESLKITCLTIGSRGDVQPYIALCKGLLADGHRPKIATHREFESWVRQHGIDFAPVDGDPAELMRICVENGMFTYSFLREATQKFRGWIDDLLSSAWTSCQGSDILIESPSAMAGIHIAEALNIPYFRAFTMPWSRTRAYPHAFAAPDHYMGGAYNYMTYVMFDNIFWKAIAGQVNRWRKRQLSLRSTSLEKMQPNKVPFLYNFSPSVVPPPRDYGEWIRVTGYWFLDEGSDWTPPEELTAFIQKARTDRKKLVYIGFGSIVVSDPATLTMTVIESVLKADVRCILSKGWSDRLGDPASTKAEFPLPPEIYQITAAPHDWLFSQVDAVAHHGGAGTTGASLRAGVPTVIKPFFGDQFFFGSRVESLGVGITLKTLTVSLFSRALWEATNSERMIIKAKLLGEKIRQENGVAAAIQALYRDLEYAKTLVRRRVDAVVSNSAPLGSHEAIKNWEDDLVGIEDTWTLIGHPDTDMELSQSSKDLGSDFDLRASAAAATGTRPSALVEEGDEDGEDAGR

SEQ ID NO: 7690 - protein, 1331 aa, Serendipita vermifera
MSGTTIDTDASTLHLHEEEDNKEMSQSVVDRIIRKTSQVTKSGHRKLNSLSRRVKSPHEASAEQNGTHEETSGDTVDPFAQPTSNPPSRPSLNASFRGEGSLRMGTQTLIQALQAIPWSDVEEGPNDKDDSDENDADHKPAFTLSSSIHTIHRPVARIHKRSKAAAPIASSDDDSSIEEEEDDFDIQAPPLGVAAASPLHITTSTQPTKGPTSMSDSRTMMRRTTSLATVKVQKRAKLAEKLKAVFEIAEIEEVTAEMPCWLLRSVLLQGYMYLTNSHICFFAHMPSRENQILKSGSLAKKAQRTKRWNKHWFVLKNDALTWFHSSADPYFPHGVVDLRYAISCEPHGEKGIRVRTNQKTVNLEADSVPSRDEWVKSIRKVIFQAQNLGDNVKIAIPYSAVLELEKSKAMDFSETIEIKVLDKEDSCVDSYFFAYFHNLDLAVEEIRQAVQKGKSIPRSSAQETVKDTTSNLHAPPPPPVQQDSLSSTSQGTLSSVRDRLSAPVGKLGSMLRPVASAPTPPSGSRPTSMLSSDSGPMFTSPASTTPIQSKTPTDHTYPPALIHHPASGASDNSAKSTWSVPVGVPSWLKAPSRRFFFSSPDSTTTALAQGDIGDIHETSAHSTLDHADFGFSIVDGVDSNALDPMTVDKFRAAFAFDEKETLLAEIPGYLFRVLPVFGRVNISSNYFCFRSSQPLTKTRMMIPIRDILSTENAKAFRFGHHGLVVVIKGHEELFFEFNSTERRNACAELLAKLVEECRERQRFLGTSPHPVTRQDSLVLETLTETETEPNSPVQPPPESQSEALPAVMFTSLGSAFLTFKPQESLRFTCLTIGSRGDVQPYIALAKGLQADGHRVKIATHLEFKDWIEGHGIEFGYVGGDPAELIRICVENGTFTVAFLREGLSKFRDWLDDLLATSWDACQNTDVLIESPSAMGGIHIAEALQIPYFRAFTMPWTRTRAYPHAFAVPENKMGGSYNYLTYVMFDQVFWRAISGQINRWRKVTLGIPPTTMDKQEAHKVPFLYNFSPAVVPPPLDWYEWIRVTGYWFLDDSENSTAKKWEPPAELLKFIETARADNKKIVYIGFGSIVVSDPDAMTKCILEAVKKSGVRAIMSKGWSDRLSTKKADANVNDAHMPLPPEVHNIAAVPHDWLFSRIDAACHHGGAGTTGASLRAGIPTIIRPFFGDQFFWADRVEALGIGAGVRKLTVEGLTTALVNATTDTKQIARAAAIGKAIRAENGVATAVESIYRDLEYARSIIKFSQEHHDSDGTEGLVEAPHDDVRSNRALSDDWNLVDEGHLENGKDHGGILSPLKRVSLGLSGLTNNLHHPRH

SEQ ID NO: 7691 - protein, 1245 aa, Diaporthe ampelina
MDFPEQLQQKDGDEEQEEDVVPIGLGNGNHSFMNLNQSIFGLIAAAGPKVDFHDRFEGHSSEEEEADESDDDGARPKRKDDAATGKLAQTTVLKKPASKTSKQHRRKFSDSKLMKLQKIFEFEEPEELISGVLLQGYIYITSKHICFYAYLPKKAVSQPEPHPEKTSLTIYKHEVTKSGYLFKSGKRNPKYNRYWFRLKGDVLSYFRDPSNLYLPHGQIDLRYGISATITDKDKDGLHFSVETDHRTYHFRADSAPSAKEWVKCLQRVIFRSHNDGDSVKISLPIANVIDIEETQMLEFADTCKIRVIDNDETYAIDEYFFSFFSFGKEAIGVLKILIEDATSTVNDSQHRKLDVPPTVDEAAASTVPASKRSSSTGLQPGFQPGLAPIRTAKIRDNGVDLSSGEKMEGNPSTPTLQTISKMGSYPLQRVGAFAEYLGRHSKRVGGLLATESVGYAGKMSGMWKGGQRHYDEPAALRTDDEADDEEQDKVSEQRFQDHFALPRSEKLRATYFGYFMRVLPLYGKVYMSDRNFCFRSLIAGSRTKLILPIRDIENVTKSSGFRFGYAGLVVVIRGHEELFFEFGDSALRDDLAIFLLRGIEAAKFLRESGELDSEEKEDAQNAEEEHKALEEARHDEFPDHEITLPRQTSNISDGPTIIFDDPKASFINFKPEKALRITCLTIGSRGDVQPYIALCKGLLAEGHKPKIATHAEFKDWIEGHGIEFSPIEGDPGELMRLCIENGTFTVAFLREASSTMRNWLDGLLASSWLACKGSDVLIESPSAMGGIHIAEKLCIPYFRAFGMPWTRTRAYPHAFMMPERKMGGAYNLVTYVLFDSVFWKFTAHQINRWRNKTLGLPNTSLEKMQPNKVPFLYNFSQHVVPPPLDYSDWIRVTGYWFLNEGGENWTPPADLVAFIEKARKDDKKIVYVGFGSIIMDNPAKFTREIIDAVLKADVRCILSKGWSDRLDPKSEEAQKAGAADGDNSTKGTHGGKSGTTEIPLPPEIFPIKSAPHDWLFNQIDAAAHHGGSGTTGASLRAGIPTIVRPFFGDQFFFGNRVDDLGVGILLRKWGVNSFARALWEATHSERMIVKARVLGENIRKENGVDTAIQCIYRDMEYAKSLIERKAGRNAAAAERAATSGSDDLDDDVEEESWTFIGDDTGTDENDLDIDGVMRRSQFLVPIGLPEGPSARNKSLGSKALMSSSNPLVMPGGNSAVKPPAQRSPLSPPRQGSTSNDSAKENDRGR

SEQ ID NO: 7692 - protein, 1033 aa, Fusarium oxysporum
MIAFADTCKVRVIDNDETYAIDEYFFSFFSFGKDAINVLKILIEASAESRSAEKAVSSREENESSQSPSGRTSMAASRHLPQIDRLHTGKLPDAVKATLAPMSPLSPHSPSQLSPRASMDAPRSSFDGFRRFGRKSMDVPSSIGDFSSRRSFSGTRRSTSRHQHGSTTPKQQQAQDSGDSFIHSSIDNPSISTLSPSSFEDPSASQILQGSEVFHSPTMRRSASASRKRDQSGKKTPRNSTSNRERPRHIQHAATTGAMQEMGGETSDSQRPVTPTLNSITKIGAYPLQRANAFAEYLSRTSQRMGSMFATESLGYVEKVHGMWKGEHRHYDEPQELKTDDDVDDIDSDAEDKTQTAMDRFRAHFTLPESEKLVATYFGAIFKVLPLYGKFYISDRSFCFRSLYPGTRTKLILPLKDIENVHKEKGFRFGYYGLTVVIRGHEELFFEFRRPGLRDDCAVTLHQLMETNRFLEKSGFLDQEEQDDEEAAAAIAERDALKAARQDEFVNHELELPRETSGVSNAPTILFDNPNSSGLAFKPQKSMKITCLTIGSRGDVQPYIALCKGLLAEGHKPRIATHAEFQGWIESHGIEFARVEGDPGELMRLCIENGTFTWAFLREANSTFRGWLDELLDSAYTACEGSELLIESPSAMAGIHIAEKLGIPYFRAFTMPWTRTRAYPHAFIMPEHKMGGAYNYMTYVMFDNIFWKATAFQVNRWRRKTLGLPSTNLEKMQPNKVPFLYNFSPSVVAPPLDFSDWIRVTGYWFLNEGGDWEPPQELQDFIAKARADGKKLVYVGFGSIIVKDPAKMTQEVIDAVLKADVRCILSKGWSDRISPKDDPSKPRPEEPEMPPEIHVIKSAPHDWLFSQIDAAAHHGGSGTTGASLRAGIPTIIRPFFGDQFFFATRVEDLGVGVWVKKWGTNSFGRALWEVTRNERMIVKARVLGEQIRSESGVDSAIQCIYRDLEYAKSLIKRNAGKAAQHDANEDDDTEESWTFVGRDEPDPDAVTKKLSEGLVDTEKPLSLGSQAPSTAAA

SEQ ID NO: 7693 - protein, 569 aa, Citrus unshiu
MENHGRRCSDASEDVSVDYDAEIESENCNGRGDSSGGQNAARDDASTSSDVRSCSSSERGKVVHNHSLGILSARLFDERVPFRKKLKWLNRLATVKDDGTVQFEVPADIKPQNLDFGTGVVYTDDSTDQEPIEAADVHGIPRLHIVMLIVGTRGDVQPFVAIGKRLQEDGHRVRLATHANFKDFVLGAGLEFFPLDMVKNKGFLPSGPSEIPIQRNQLKEIIYSLLPACKDPDPDTMVPFKPDAIIANPPAYELLKVPLHIIFTMPWTPTSEFPHPLSRVKQPVAYRLSYQIVDALIWLGIRDMINDFRKKRLNLRRVTYLSGSYSSPLDVPYAYIWSPHLVPKPKDWGPKIDVVGFCFLDLASTYEPPDSLVKWLEYGEKPIYIGFGSLPVEEPEKMTEIIVKALEITGHRGIINKGWGVAESKDFVYLLDNCPHDWLFSRCLAVVHHGGAGTTAAGLKAACPTTIVPFFGDQPFWGERVHARGLGPAPIPVDEFSLDKLLDAIRFMLHPKVKEHAVELAKAMENEDGVTGAVKAFYKHFPGKKSESEPELPHSHRGLLSIRRCFGHT

SEQ ID NO: 7694 - protein, 1217 aa, Vanderwaltozyma polyspora
MIRNSTNTNNIMETEVALKDWILYYHKLCEVNSGEIFSGNEIITDFDDPVLSDPLLNLKPLPKNEVTVNKDNVIKDNDYSSNGCDFAKSKFHIKGLVGLLTTASVYIGLDNSTNPSYDISQACEFDLEDNTVQQGTGRSANMNPACKVAGFNKSSVRDTIFNIFKIPKKDEKISNDMEVNNTLSRDLDYKKDLFEFVRKYFGISEEETLIGHYTGWLLQEVLIQGNLFITNSSLVYLAHLPKLTDAVVLCGKLKLRSRLKGNPRYWCVLKHSTLALYNDPSDIYFPILSIDLNHVEEISLENSLKDENTMTFVLEASSKNYKFIAGSSHSAKTWVKCLKKQLFSIKNQSKDTIGIKFPISSIIDVECQSYMNQGQSIKVKCFDGNKNYALKEYTFLFFDKDGDSFYNIISNFIPRNMNPVEASLQNSNPTIHLNSKSHFNDKIKILSAVNIDDIICDTDSFEMTSSDILSDIDENIQPLSLKHVRDISNCKNYLKEDLKTSNKMTIQDCNKKVQTSEIQLITYSKHDSRMELNDDSKYYQGNIGNDNKGILSFKNICSIWNTSPIHNKDSDNFFMTSDPFVTSINDTTLAKIKDWFNLHDNEVLHALYYAYLIKGYPVYGKLYVTNRRLYFKSCIPGVNVKMVLPLEDIEGYNEILGTNYGNFGILLTVQNEKELQFGFNSCTNRSDFENVLQRCLDICKYAIKTPELVTSRVIESESEHSRLRFFEEKFSTEGIDIPFLVEDNPYFKTKIMPTKSYNFGFLTIGSRGDVQPYIALAKGLIQEGHSVTIITHREFKSFVECHGIDFKEIAGDPTKLMSLMVEHEAINVGMLMEASSKFRGWIHDLLVTTWEACKNLKLDILIESPSAMAGIHISEALQIPYFRAFTMPWTRTRAYPHAFIVPDQKRGGSFNYLTHVIFENVFWRGICSQVNKWRVQTLGLEKTNLAQLQQNKIPFLYNISPVIFPPAIDFDEWIKVTGYWFLDESESFEPSQELETFISKARKLGKKLVYIGFGSIVVNNAKEMTRAVIDSVLETDIFCILNKGWSERLGKEELRYEEEPEYPETIFLCDSIPHDWLFPKVDAAVHHGGSGTTGATLKAGTPVVIKPFFGDQFFFASRIEDIGAGIALKKLNVSSLSNAIKKVLTDKSIKRKAVSLKKRVAKENGVTTAINCIYSELEYARSLVVKKNHKSSNIEFIQHPNNVNDTTKTVIPLTSMV

SEQ ID NO: 7695 - protein, 1378 aa, Penicillium brasilianum
MRPFLDDAKRQPERADQRLSASMRPSSGQRLLSDRMPERFRDGDDAQVDYTAPPQNMRSRDGHMHYMQQSLFSVLAAVGSRSDFRGRFDDSSDSDGEAGESHTKTGLQSGSSREGSSDRRRTSKKTTTNSRDEAEERGRRHQRTKSENKILRSIPGVGSQDKPDEPLAASGATLKVPTRRTRSATPRAAPILTRMIQAQNRFDGATEPENPPSRPESPSHDPLEPSESSALSTRLMEMFGFERPEKVLVEYACALLRSMLLQGYMYVTEGHICFYAYLPKKSTTAIKSGFLAKRGRKNPKYNRYWFVLKGDVLSYYADPSNLYFPSGHVDLRYGISASLAETKAQGSDAKDFQVTTDQRTYHFRADSAASAKEWVKSLQQIIFRSHNEGDSVKIAFPVESVIDLEESPMAEFAETFKIRVLDNNETYAIDEYFFTFFNSGQDAFNYLKSLVHSSPAKNLSDDSPHKSDDKVQYEICSRDSNIMAANSRRLSLPTDDQSPHGRSTSIENDPQDSADSFAPSIDRGTESSRIVQSLTETNESASQILNRSDVFQSPTMRSLPRRPSDVGATGRRRSDDTARSASARLGGIVRRDSSGLSSPSRNAEDSRVARGPADQRISNPSRYPPGAPLNDLVKAGVYPLQRAAGFAEYLKSRSKQMSSLLATESMGYIEKVSGMWAGGQKHYGETEEVIHDDPTVDPEDKQGGLKHGDRFRAHFGLPPTEHLQATYYAYLTRVLPLYGKIYLSERKICFRSLLPGTRTKMILPLKDVENVEKEKGFRFGYHGLVVIVRGHEELFFEFNTADARDDCAVTLHQNLESVKYLVESGMLAEEERDRVEAAKAEHRMLEEARLDSPVEHDTHPTLNESSSEISPFFDDPRASIINFKPTESLKITCLTIGSRGDVQPYIALCKGLLAEGHKPKIATHAEFEPWIRSHGIDFALVDGDPAELMRICVENGMFTYSFLREATSKFRGWIDDLLSSSWTSCQGSDVLIESPSAMAGIHIAEALRIPYFRGFTMPWSRTRAYPHAFAVPETRMGGAYNYITYVMFDNIFWKAIAGQVNRWRANELGLKATTLDRMQQNKVPFLYNYSPSVVPPPLDYPDWIRITGYWFLNEGSDWTPPAELSAFIERARADGKKLVYIGFGSIVVSDPAALTRTVIESVRKADVRCILSKGWSDRLGDPSSQKLEIPLPPEIHQIQSAPHDWLFSQIDAAAHHGGAGTTGASLRAGVPTIIKPFFGDQFFFGSRVEDLGVGICMKKLNVSVFSRALWETTHSERMIVKARNLGTQIRNEDGVATAIQSLYRDMEYAKTLARQRSIASSTPFSPTPSAQASPDHDDDDVDDIEEWTFVGDENEMDLTKRMRDLSASDREKVASAVF

SEQ ID NO: 7696 - protein, 1482 aa, Coniophora puteana
MSKLTSWKPLARGPVVTGPHDTSPQGMGLEDKGSDTEDNDGALSSSAQRFKRAVLKTVDLGKSVPARARSPSSPFKGTKGLLSMSGQGRTRPSANPADSSKASPSDGPSNLKVSTSSLGDDSPFIKPPSPTHTPLRPLLQSFRGVGSMRAGTQTLIQALQALPWAEDPDNETDPMSAQLGQVDSDGDDDVAHDPETPMSSSIHAIYRPVARFRRSEIKLPSASQTQGKLPVQPREESETEEGAGPSEDDAENDFEAATPRPEEAQRPAYIMSQSAASVKHLNYSRRVNVSCTGSMATVKLHRRARLAEKLREVFELDSIHEVLTEMPCWLLRSVLLQGYMYLTNSHICFFAHMPTREDQVLKSGALFKKATRTKRWSKHWFLLKNDALSWYQSSSDPYFVNGIIDLRYTLSCEPVGEKEIRIRTNEKSIHLAADSIPSRDEWVKAIKRVIFKAQNMGDTVKIAIPYTAVVDADKSSAMDFSETIEVKVIDKEEPYAVDSYFFAYFSDLSLALDQIRDAIRSYRTLSSVEHALLDTTSNRPTPVSPAIDRARSLPANDSKNSTGFRLASLLRPFHESLPSGKQNSVLEATPNEGTDEFTHITKREGSSFVPIETGGDGSLEPVRSVASISQTNASSRSGPTPTTHTYPPSTSMAELPLPLSRSTSNAAWNMGIPSWLKAPRKALVSSSSSTTIGPPDITTSPTSEVREMFSSTTQSEASQHDLGYSILEVPERVVDHNLTEKFRSSFAFDEKETLLGYFYGYIYRLLPLYGRLYVSTNYFCFKSSGPLSTKTRMILPIRDILAVETSKASRFGHHGLVVVIKGHEELFFEFGFEDRRTAFVTILQQQIEELRQRLTGPDLPNISQGHRDALVLEEFESKPSTNSEVCTEPSETLSESVPAVMFASTSSTFLTFKPKESLHFTFLTIGSRGDVQPYISLAKGLMQDGHRVRIATHGEFQDWIESHGIEFGFVGGDPAELMRICVENGTFTVAFLKEGLLKFRGWLDDLLRTSWEACQGTDVLVESPSAMGGIHIAEALQIPYFRAFTMTWTRTRAYPHAFAVPDRKMGGSYNYMTYVMFDQVFWRAISGQVNRWRRNVLHLPNTSLDRLEPHKVPFLYNFSPTLVPPPLDWPEWIHVTGNWFLDDADVSATKWTPPPDLLPFIDSAHAQGKKVVYIGFGSIVVSDPQAMTRCVIEAVVRSGVYAILSKGWSDRLHTKTAEASEPKEPLPPQIYSISSIPHDWLFQRIDAVCHHGGAGTTGASLRAGKPTIIRPFFGDQFFWADRVEALGIGTGVRKLTVEALTDALTSATTDIKQIDRARIIGEQIRSENGVATAIEAIYRDLDYARSLIKRTADRTLDDEPNVESPDQEQFPQPSQSLMDRSLSRSHRSSRGSHRKTPSEDWSVISDQEEPRSSPSSRRNSRRSSEGKIERSPTAKRTGLTAAVMSVLPSATHRRSGSIHLNRPRIDISIQPTNFCYDLYALA

SEQ ID NO: 7697 - protein, 1258 aa, Baudoinia panamericana
MSQSQFLPPRETVVEPPERPTSADGVRSDAPMLDRKLQAKARAEMDASTTSSSSRKGGKGAPAQVAPNKPELANALADIFQFDEPEEVIGEFACWYLQSVLLQGYMYITRKHVCFYAYLQKKGHIVIKSGHLAKQGKRNPHYRRYWLVLKGDVLSYYESAADPYFPRGTIDLRSAVSAELTPEKGKATKETNVFAITTEQRTYHFKADSITSAKEWVKQLQRVIFRSRNDGDSVKISLPLANVVEVESSPVTDLAETVRIRVIDDGTTFAVDEYFFTFFSRGSQALDVLRTLTEDNEARRRASRHGRALGPEQSPRDSDRSPGVPQPVRSTLSPVSAVAGRLSPRASGEYRRSSGETSRASIDQGRASFDRGRRTSVQQGRRSSKSPVSPSAHNSADSFKTSSEHVSSAPSTPGGVNDMSASQMLTGDGAFRAPTLRQPLPKSTLSVTTVERLRREPQQLSAAPMQTAPGTTRRQPPSRTLAGEIMAVTDPPRPMHTILATPLQFAYGLAEQVRDQSRRGLSYLGSSPKDYYNRFSGALAGGKLEYGDDDGRAAEDRIRDSEANLDEANAEKRFREHFKLPESERLLTAYYCSLHRVLPLYGKIYVGTRHFCFRSLLYGTRTRLVIPFSNLLNLEKEKGYRLGYPGMVVVIRGHEELFFDFQNVELRDDCVVNVLQRLDTARQLQDSLLLTEAEKMDAAAAAAEHEVLQRARKDGFANENFVLPQDLQNVDLSDIPDAPILFDDASMSILDFKPKKPMRITCLTIGSRGDVQPYIALCKGFMADGHHMRIATHSKFKAWIEKHGIEFAPVAGDPVELMELCTEHGMFTPSFVFESLGKMRPWLDELLKTAFTACKGSDLLIESPQAMAGIHIAEALGIPYFRAFTMPWTRTRAYPHAFAVPSRKLGGQYNYLTYTLFDNVFWQMSAAPINKWRGKTLGLKPTTLDKLQQNKVPFLYNYSPHVVPPPLDYSDWVRPTGFWFLDEGANWRPPDDLMRFITKARADGKKIVYIGFGSVPINESKQLLQQVVNAVIKADVRCILSKGWADQGSKKDKTTALPIPLPDSVFEIVAAPHDWLFKQIDAAVHHGGSGTTGASLRAGLPTIIKPWFGDQFFFATRVEDLGVGFYLRKTTSNELGIALWYATHDERIIKKAKVLGEQIRSEDGVGTAIKAIYRDMEYARTLIKKRAVNIKATDVDDAEDEEEESWTFVENESDVDIASLRLGDSAATGSTAHQQWNRALQYGRHLSLGATALKGRLT

SEQ ID NO: 7698 - protein, 1656 aa, Candida auris
MSKKSSASRERKMLAKLGIEEKHEYLQNYLPLYRKISDAVIPPLQSSLEFIHGGTHDDSSDHSDAQSRYMDADDGKTRNGHNGERQNIEPHEDDSYDVAMPLGEEHASNSFLNTLTMANVYAGVGSLKNLKNLLSDLSNPSWLDHKGGRLVGYSMYSSESEDEDEADHDGSSGKNDDTERDDKYALSDKPSPTKKTAQKPAPTSTTMASSTTEASTATEASSTTKSSYTTKASSTTSAAKADPTDVDEEEDAAGCAQPSTTVPLVLDETITLQDSTAESFKPTLEPEPPIDATVGTGFLYDAFELPPESDWTPWQHSVMKRLDITPLKEVVLIKFKEQSPSKTDVESNIRQKLTWIIGDRMRKTFELKSSDTFYANFDSWLLRDVLLQGQIILSEDAVCFYSLLPGTMDHQSDQQENPDLALYEGTLGMKVGEGLLLSNTHRFWAVLRPETLSFYTSSTDMYFPEKVVDLRNALYCELSKDPAQPSSPPPGSAEGVASPKSRGSFSRDSFYLSTASISPSQPGSETSSINEADLEEASEEMSTGVWFKVVCTNKTYRFQAGSLFSARHWYNSITKAIFQLHNCNVRREVLHKIPFTQIVEYQKNFVLADAMTGADNSEDNETPISFSIKYVSPHEPANLKFKGKFEVGKQGPYETVHFVMFHMGKDFADTFGNLYDKNKSQRHESQRTLNQRVKRRAKMVFNDDVPSSSQNMPSLTTLQPDYASANSLVDKIAKVNDRIIQNKLNEASSSGNFSDDEISTSEGNERIRSMAKLLGINKLPKIECESSGSLSPKSIRAAWESRQSISDAITSPLQEDGVFLQLPKPFSLSTLKNLNLNMILSKRSFADIEKRLIAMDESNPLERSNTMTNVTFTESYKEFAESISELTISDGDKKSKHEAPKKSKFDTLKKKVKTVSGMGGVWSANPDHYIKLDDVEDDKYYVKNASERENNEKRFRKHFSLNSDSKLVATYHCHLKRSIPVYGKLYLGSDKLCFRSLIPGISTKMILPLKDIENCANEGGTNFKYSGLIVTVSGMESLILEFGSQKSRNDCSTMILQQLEIIHADESWAPKAHEWGVAAKYRDPSQKEDMIMRSNHQSRERDIALAKAKIRIARLRHLEDRISTASGIEFPLIFEDSLFYQTEVRPAKSYNITLLTIGSRGDVQPYIALGKGLLNEGHSVTIATHSEFKDWIEKHNLIFKEIAGNPAELMSLMVTHGSMSVGFIKEASSKFRSWITELLDTSWTACQGADILIESPSAMGGLHIAEALGIAYMRAFTMPWTRTRAYPHAFIVPDSKRGGSYNLLTHVMFENVFWKGISSQVNKWRVEKLGLSKTNLSKMQQYKVPFLYNISPSIFPPSVDFPEWVKVTGYWFLDEGDANYEPRKELVEFINSATQNNEKIVYIGFGSIVVSDAKSLTKAVVEAVEESGVKCILNKGWSDRLSKDKGEIEIELPPSIYDCGPVPHDWLFPKVDAAVHHGGSGTTGATLRSGTPTIIKPFFGDQFFYASRIEDLGVGIALKNLNSKSLTKALKSITRETKYMEKAKAVAHSMEHETGVLTAIDAIYSELAYSRSLMLTVRYNTEARRDDRSGIQTPVVDEEDYFMEDDDSDDDISDDEDDSEMSDQSEDECSESESKINKKKTKLCPLSSNRQNEKST

SEQ ID NO: 7699 - protein, 841 aa, Rhizoctonia solani
MIIPDDTDDKSKSAPAEHDTRHIQIDSESGSKPPPSTGYEYDHEEPGPPQYEEATRGTSAPPSSVDLKSAKDPRRESTQSYASTSSSIPEGEPNAEFRTAAMAASAAFQPDGRFQVSIDESPEKLPRNYGSPIDEPAVDLTNFANAPPMNVNIMIVGSRGDVQPYLALGKRLRQHGHTVRLTTHETFRQSVKEAGLRFFNIGGNPHELMSYMVRNPGLMPGFESLTNGDITRKQMMVAEMLERCWRSCYEPDDALDGGANFVADAIISNPPTFAHVHCAEALGIPLVMSFTMPWSPTTVFPHPLVNVRKSQAEPRMTNYLTYGLADAMTWQGLGHTINKFRRKRLGLPSLSVVSGSGIIERCGVPWTYCMSPALVPKPQDWVNHIDVVGFYFLDLATEYTPPEDLVAFLDAGEPPIYIGFGSIVVQDPIEMTKTILSAIAQTHVRAVVSAGWGSLDRKTLGDALDSNIFILGNVPHDWLFERVSAVVHHGGAGTAAIGLRCGKPTVVVPFFGDQPWWADQIHARKAGPAPIPHKQLTASALAGAIKSALSEETRAAARKVGELIRSEDGVRNGMDSFHRHLPLLNMRCDLDPRRVAVWYSRSHKLRLSAFAAQVLAERGVLDVNKLELHRPREYITRVQPTNPVSGTLAPTLGVVGDVIGGVGGLFTTRPEKGVIKLVKAGPEAARGILEGLHHGMNNAPKIYGGSVREPGKVTGFRSGLREGRKSAAMGFYDGFTDIVKEPVDGFKKGGIMGGVGGVLIGLTNAVVKPTAGIVGMLSQPVEGTIQSARSFMAKPVKERYATRYAEGVAAFKESTEPEREAVIRAFEEKSRSKIKGKQKST

SEQ ID NO: 7700 - protein, 1370 aa, Penicillium griseofulvum
MRPLRDDAKRRADRQMSASMKPTWSNRPFSDRVPDRFKDGDDAHVDFTAPPQGMGSRDGNVHYMQQSLFSMIAAVGSKSDFHTRFEESSDSDGDMEEHPRMEQTIGKTSQAPMPSFDYRHPSKRSEPNTLVQEERGRRHQRARSDNKLLQRVSTLDLQGGANESSNQIDSTVKAPSLRRTRSATPRAAPVLSRMVEAQSHFDLTSITPHLPSNPDKPMEDQQQSSASALSTRLMKMFDFAKPEKVLVEYACSLLQSMLLQGYMYVTEGHICFYAYLPKKSNVAIKSGYLSKRGRKNPTYNRYWFALKGDVLSYYADPSNLYFPSGHVDLRYGISASLTERKDGDTKDFQVTTDQRTYLFRADSATSAKEWVKALQKVIFRTHNEGDSVKVSFPIANVIDLEESPMADFAETFKIRVLDSGETYAIDEYFFSFFDSGKDAFNYIKGLVNAASETTPMKDPQVQHDIKHQPESSHTAYKRQSVSCVRVSDHGEEGSPRKRSSSVGNENQGSADSFAEQGTGSSPIIQSMTDTTESASQILNRSDVFQSPTMHTLQRRPLDAGETVRRLSDDTTPSASVQLDLGAMADSPSATLGRKEVTEATRYPTGQPNPMESSRPSSVTHLNELVKAGAYPLQRAAGFAEYLKSRSKQMSTLLATESMGYIEKVSGMWIGGQKHYGEREGPLQDQNVDPEDNEGAFNYGDRFRAHFALPSTEKLQATYYAYLHRVLPLYGKIYISQKKLCFRSLIPGTRTKMILPFKDIENIEKEKGFRFGYHGLVVIIRGHEELFFEFNASDSRDDCAVTLHQNLESAKFLVESGLLADEERDEVEAAKAEHRMLQEARLDGPEEHDELPTSTEDSSEIHPFFDDPRASIINFKPPEPLRITCLTIGSRGDVQPYIALCKGLLAEGHKPKIATHAEFEPWIRKHGIDFAPVDGDPAELMRICVENGMFTYSFLREASLKFRGWIDDLLSSAWIGCQGSDLLIESPSAMAGVHIAEALRIPYFRGFTMPWTRTRAYPHAFAVPENRMGGAYNYITYVMFDNIFWKAIAGQVNRWRNNELGLKATTLDKMQQNKVPFLYNYSPSVVAPPLDYPDWIRITGYWFLNEGTDWTPPIELSNFIAQARADGKKLVYIGFGSIVVSDPSALTRTVIESVQKADVRCILSKGWSDRLGDPASTKTEIPLPPEILQIQSAPHDWLFSQIDAAAHHGGAGTTGASLRAGLPTIVKPFFGDQFFFGSRVEDLGVGICMKKLNVSVFSRALWEATHSERMIVKARNLGIQIRNEDGVATAIQALYRDLEYAKTLARQKSLASSTPFSPTPTAKTSPDGGDDELDDIEEWTFVGEETGFDISKRVRDRAASDADKLGTNMFQ

SEQ ID NO: 7701 - protein, 1750 aa, Moesziomyces aphidis
MGSTVDSALSGCGRWKRAGKEVRERGCRWAFLRASASLFKNLKNGHAGTICHERGMPHRQQQKLENRRFQKSPVPWQREGSGVKGSHTGALTLADCGSGGWDGGGRVPQKRPTARSTVLAVRELNTTALILCTSVACLGTAFASSLAGNHLQPPASQDVILASTASVLIASASASIAAKVPEGPLRAIIMSFEATQGPVPTSGDEPRSASMPTSQGAADEAHTSTSDNASEVPQQSVDLSDSFGTPPFPKSPRLDPSSPRNFSTISSLAGSRELGRPVLEPTTRIFAVGPTASTPPAKVSLPPMRPPGISQGQPADVAFHAEPQGLMQMLSLVGSTLLEAERVGFAEDDADELEAQPSARTADPSDPFGIPHDVTGSASRRSTRHFAPGLARSVFDLASAGTAKGRLRALAREDASDDGSTPQGSRSPLDGSVHTIGASRKKRISLTQSEIFASPSDPTADSSGRRASSLRSQLQPSPFASGSTSTLNCELDSDAPDSLDQRSAGQTAAGTLPIEKRSISMQHQLSFSPINSIAQLPTEGDVDPLLIRPYSHSLVADTPVSDSALDHDRLEQQLRDTFQLDASETLVMAQPCWLFRSLLLQGHLYLTNGHLCFYAYLPSRDEKVVKTGVLGKRTRRTHRFSKHWASLQGSKLSWFDSDRDPYFPQGHIDLRKVSAIEPSQNHKDRFKLNTPARKFTFLAEDEASRDAWVSALQKETFRAQNQGESVRISIPLETIMNHETTLSVDGTEMVCISVVDEAGDFSVDEYYFLHLGKPSAFIAALNGLIDSGLGSVSSLQSGDAALNLSKLSIRDSTGAAYAIAMSRRSLEEVPTLPKVPVKAQAPDTTAPADRTETLVTSNAPTMAAVAIPQSGRRKSQDGSADGVFSTTPRAAALNRLSMESTHTYPPSPSLSDPPTSFDQVQREAERSWSIPGWLKSAPAKVLGRTHSSHPHASNAQDSERTSGSKRRRKVLETWSGDNTESISREGSSTDTEDDMLSHSIHSTQSGFSMLDADDEGQEDLGRVAAEFRDTFGVVQDEGLVGHTHAYLYRVLPVAGRFFVSERHLAFRSSGIAAKTVGRTLMLVPLQDVISAAKQLAFRPGHHGMVINISGHEELFIEISSANRRDELLSLIEYQLELISAGHRSKESRDTVNREQSHALVLRDLSEKITDDPSTTSVASSADSSMLSQQSSDLDTSGDLSHLGGRASLLTFAPTAPLTFTMLTIGSRGDPYIALAKGLQADGHNVRIATHAEFGDWIMGHGIGFSEIGGDPAELMRICVENGTFTVSFLREGVTRFRDWLDDLLASAWRACQGSDVIIECPSAIAGIHVAEALQVPYFRAFTMPWTRTRAYPHAFAVPNNKAGGNYNYMSYVIFDQMFWRASSFQINRWRKALLGLKPTNFDRLEQHKVPFIYNFSPSLVPRPLDWYEWIHVTGFWFLDNPDNSSSKKWEPPEELVTFIRRSRERKRKLVYIGWGSIVVPDAEAMTRCVLQAVRKSGVCAILSKGWSDRLSGDASKRSAALDPAVAEDVFQVSSVPHDWLFPQIDAACHHGGAGTLGASLRAGLPTVVKPYFGDQFFWGQQIESLGVGSCFFWGQQIESLGVGSCVRQLTADNLAAALITATTNAKQIERARKLGEQIRAEDGIGNAVKAIYRDLDYARSRVKRDTRIESDAPAAPRAENTQPTELRAGQLGARPELARTASQGFDDSHSSDGWSDIGGAPLSPSPPNADADAILDLSRAGPACVEAPLS

SEQ ID NO: 7702 - protein, 1623 aa, Trichosporon asahii
MSEQDREVVVETVTVETAPPELQPQPQSQLLGGVTQPPPPSTATDAPAIGPSRGLESAATPMPQQPPSSDLDQQTPTTDLPQHPAATNIPVASSESTSTLSTETQSTIPASASSASAIASAAAPMTDSSQSLPISQLQRLSISETTAEGLVESPADMSPLAAARPPFERTETGSTTESRKHTALPPVQTEGLLSPISAGPSLLSSTYSLRKGTGDSGRNLRGARHWSRDDVPPHSPEEGLGKESMVIQCDDDESDEDVCHGTMRMGTSALVSALTALPWESDEETSADEDHMSRTQVINPQRPRHEAHGGHDSHDGHDEHRQDHEHHLFHHHSRSRSRASSSGASSDSSMQSGSRTKSRSRSRSTSPHKRHHLFHRSLDFPFKENTIARRAQAPGPLELSYQLSPERPGHKPLPLSGATTPAEEESPKTRMDHEVDLGERIRKGKLAQRLQEVFGLEEEEEVVEELACWLLRNSLLKGYMFLTAQRICFFAHLPEQDPIKSGPLWKKSKKTKLSTKFWFVLRNDVLSWYESATDPYFPKGNVSLQYASSVDMISGAKFKLRTAERNYTFTADTEANAKEWVRVLRKVILKTQHHGESVKLIIPLDAVVEIERSPTLEFAETVEVKVVDPEDAMSVDSYFFAGFSDNDYAFDVIQALLSARPRKELDPPQVPSTAELQQQAQQLADEQGTRPGSAASYASASVSKVGSLLRPLISSQHTSDSRVPIAAPPPPSLPEVGDTSGFTSDYESEADSANRSHGGYPPKPVGRPPPRMLEQQSGSWGTPGWIRKPAAKLFGSSPSSSDIQPRRRPSRRVKKRKQPSVTEVVEPTIPLTTDEEMSETETPRRSRHRRMHSGGSSIIQRLTGGSVSDWSIDSETDEASRKFHAIFSMPDTEVLIDDFTGYLYRVVPVHGRFYISQNFFCFISTRAVMKTKMVVPIKDLYGLKGQKAFRFGHHALILIVKGYEEIFLEFSSKRTRDECSRLLDQRMEQVTLAEAAESDSISDPAKRGSTLTESPKFIEEHLASGKDEKVPSPMFGSSTSSTFLDFKPKPMKITCLTIGSRGDVQPYIALCKGLMAEGHECTIATHGEYKDWVEGHKIGFKSVGGDPAELMQLCVDNGLFTVAFLKEGLAKMRTWLDDLLVSSWKACQGADLLIESPSAMAGIHIAEALQIPYYRAFTMTWTRTRAYPQAFAVPEYKRGGAYNYMTYVMFDQVFWHAISRQVNRWRKKWLHLESTNLTTMEQDKVPFLYNFSPTIVPPPLDWSEWIHVCGYWFLDDASSKDKVWQPPKGITDFIDGAHAKGKKVVYIGFGSIVVSDPKEMTKCVVDAIVESGVHAILSKGWSDRGSRNSGDKSKIGDADGADGIKYPDCIYAIDSIDHSWLFPRIDAAVHHGGAGTTGASLRAGLPTIIKPFFGDQFFWAERVESLGVGDGIKKLTTDALSKAMKSATTNERQIAKARAIGAAIRSEDGIGKAIQSLYRDLDYARSIIKPLPHHRQPLPLRPRTGSTSDTATEESWSVVSEQSAMHSPGRDGAAGAAPVSASGTPRPDQVETLSEPRVRGGPLESLQKSLAHISPRHRTPTSASATSSSEASSHHHHHRLSGFVDHLLHHHHHHEKEDKAEKE

SEQ ID NO: 7703 - protein, 424 aa, Sorangium cellulosum
MKTTILALGTRGDVQPTIALGKALAARGHAVSVLAGKSFQPWIEAHGLTAVPGSVDMVEVMESDLGREWVSRGTNPMAQSRILQRLIDRFGAEMTDDALRACEGAELILSSFTSDTYAASIAEASGAVQVSIPFQPSILATRHGPTAVAAPFPRSDSLLNLLFGKLLIEPTVWRWYGGVTARVRQRLGLPPQDRRAYMAALRRMLVVHAYSAHVVPHPPDWPPSYHTTGYWFLDEGGDYRPPEALERFLAAGEPPVALGFGSMTSHDPGATTRLLVDAVARSGQRAILLSGWAGLGDTALPDTILRIDGAPHDWLYPRVAAAVIHGGAGTVAACLRAGRPAVVVPHLGDQLFWGRRVEELGVGPRAIPRPRLTADALAAAIRTAATDAGMKQRAEELGRKIRGEDGVAAAIGHIERHLAARATT

SEQ ID NO: 7704 - protein, 1203 aa, Saccharomyces kudriavzevii
MPITQVISASNGEAGSKPSISLVPDKASKQETPLKHHRLSRSLSKLKHWRGRSSSGSSIDSAEQHDLQGRLSEAYDNDADNGYNNDNADDLAKSKYMMKSIAGLLTTASVYAGMNNAQEMNALAQIDSEESESNESSQVKLGKNEVKSKKENLKSEVSPEVPSGSDKRKPTLFDFSVTREKLSKDNVTKLRQRFCLDEQEPFLNDFPAWLLKDVLVQGHIFITMKHFLFFAYLPKNPRSVKMSGNLNIRTKLIRSTRYWCVLKNHLFSMYTSSTELYFPVLTIDLREVQKIETQKNTLNGNTVKTFKLSTNENIFKFSADSDFSAKSWVNALKKEQFAAQNSENNSISLKIPLPNIIEIDDQPIVNKALTLRLRALESSHTYAIDDFMFVFMDGSGSQIKDSLCQQLTTLQKSGVNTLYNDSPSKNVKSIDEKEAPAPAEDQKVEKDENKDSRYLNVPNSAVPSSENGKKSRFRFRGRSNSWFRRAKLLEDSQIEDVEEIYKDATDDIDSSVHSTIQVHEQEDNQEQIMDWKPSHLKNFAEMWAAKPIHYRNECIEFEKNDTYLIKVAEEVSANERFRYHFKFNKDKTLISTYYTYLNRNVPVYGKIYVSHDTICFRSLLPGSNTHMILPLVDVETCYKEQGFRFGYFVLVVVIHGHEELFFEFSTEVARDDIECIILKLLDSIYASSGEGSNLSSTSIGDVQHNPDSAKLKLFEDKINAEGFEVPLMIDENPHYKTSITPNKSYKFGLLTIGSRGDVQPYIALGKGLIKEGHQVVIITHSEFRGFVESHGIQFEEIAGNPVELMSLMVENESMNVKMLREASSKFRGWIDALLQTSWEVCNRRKFDILIESPSAMVGIHITEALQIPYFRAFTMPWTRTRAYPHAFIVPDQKRGGNYNYLTHVLFENVFWKGISGQVNKWRVETLGLGKTNLFLLQQNNVPFLYNVSPTIFPPSIDFSEWVRVTGYWFLDDKNTFTPSPEIENFILEARSKKKKLVYIGFGSIVVSNAKEMTEALIEAVVEADVYCILNKGWSERLDDKTAKKVEVDLPNNILNTGSVPHDWLFPQVDAAVHHGGSGTTGASLRAGLPTIIKPFFGDQFFYAGRVEDIGVGIALKKLNSQTLADALKVVTTNKIMKDRAGLIKKKISKEDGIKTAISAIYNELEYARSITLSKVKSSRKNEEIVDPIKLPSAETTDEAWTMI

SEQ ID NO: 7705 - protein, 1461 aa, Bipolaris sorokiniana
MASQDRDRDRSTRRMSRRRRDSRRESRGMSLDVPERFKDGDDAQEDVTAPKRNNTMSMNQSLFSMIARAGQQSQTDLGTMQEADSGDSEDEGKRQASYHGLDGAARLSRLSSANDFDISTEEPHDKNMAKGKHRRILSENKLLRSLPKLKVSSRNEGRLEGPRAHPMSSSQFLPPKPSLSQSSAVLKKWQPKSKDKDMEKEKIDITMSEETQTERAFNTGRKSRNGSMAGLDKSQQPVTLAKRIQQIFEFEQVEEVISEYPCWLLQSILLQGYMYITQKHICFYAYLPKKHHDVTKTGYLFKRGRSKLNRYWFVLRGDVLAYYTNPAELYFPRNRINLQYALTAEVLESTKKGEEETSFAITTDERRYIFKADSAASAKEWTRSIQKVIFRTHNDGNSVKISLPIQNVLEIEESSILDLANTVKVRVIDNDETFAIDEYFFSFFNNGQDALNVLRIMINDNEHHQATPDASELENQTPSHRGSVTCPTDVIEMPQIRENVRATLSPLPVTHVRRSSISDVSGRSSNEVNRKSWDVRRSMDVSHALRRSSYETRQSPHEPRQSFSGDLHSTQRKHHSEDNSSQSPRAADSESATLSFEPGTESSAAIQSIDESNASASQILDRSDLFRGPTNLPVDNAPLSKLDLQHRDSQETTRSAQAKTTNVAKRSKQSAAVMGTPDFEDDTDASQANPRMSGSSSALQDIASYPLQKASGLAGFLRTRSKKMGNLLASESMGYYEKVSGMLAGGRKHYNTAEGLETGDQIHGFEDDEDAAKAVENFRDHFAFPETEILQSSFFASLQRVLPNYGKIYISGRYFCFRSLMPTSKTKVILPMRDIENVNKEKGFRIGYHGLAVVIKGHEELFFEFSKAEYRDECAITVLRILENTKYLEDEDSSSSGVDSGDEAAKAEHDLLQQAREHTDTRKQTDVSDIVRAADHDRIPLIFDDPLASFVDFKPSEPLKIVCLTIGSRGDVQPYIALCKELLKEGHKPRIATHAEFEPWVRKHGIDFAVVDGNPAELMRICVEHGMFTYGFMKEANSKFRGWLDDVCSSSWRACQGADVLIESPSTMAGIHIAEALEIPYFRAFTMPWTRTRAYPHAFSVLEKKMGGGYNSLTYITFDTIFWTAISGQINKWRRRELGLQGTTQHKMQASHRPFLYNFSPHVVPPPLDWPDWVRVTGYWFLDESDSYDPPAELLAFMEKARVDGKKLVYVGFGSIVIDDPAALTRTVVDSVLKADVRCVLSKGWSDRLETKDASKPEIPLPPEIFQIQAAPHDWLFKQMDAAVHHGGSGTTGASLRAGIPTIIKPFFGDQFFFAQRVEDMGVGVWLKKVNTSVFSRALWEVTNSQRMIMKAKVLGQKIRKDNGTQVAIQTIYRELDRARTLIKKQTKQDDDNSEEFEEDWTIIEEGEEMDGAHPFAMQQPLAGINQDASQMGAGSLVLGSMVLKGAVAKKQAPPEVARRD

SEQ ID NO: 7706 - protein, 1505 aa, Microbotryum lychnidis-
MSADNSPFSKAFASLSVASPTPALDLGDNTTSASDAPTPQGSTKTETGSKRSDSAAPSDERLAASSPGLSGRDRGPGRFGGMAQMGFRSDDDEETSPTFASHRARSQSVFESRSRSHTIRGDPNATLAQMINALAVDEQDMSSDEATSDGGSSLQHPGLIDQHSIEESTSEESASEDDKNHPEGEAGPQLYNDRRASDASRRTAIASKVADTSASPERDPSDEDPTSSFLSVANARERRPTITRGADENMTSSIYAIHRPIAAQRRTFNGEAGEAIKDGLYAQQGEESEPIPEDHSDEEHDEHPSKLDQGGALLKTRSSRSSTVVSGRSVARKKQLADKLTDIFGLLDSEEVIAEYPCWLFRSVLLQGFLYLTSGHICFYAYLQAKEGAVVRSGGLSVRTARTRRYYRHWFILKDSVLSWYPSSTDPFFPDGHIDLHYCTSVESSKHAEHFKVATAEKRWHFSADSEASRDEWVKTIKKAVFRCQNEGESVKICIPLETVVDLEFSNNLEFAETIRVRVYDSNEGYALDDYWLAYFSDIHLALDEMKEVLETFRKAHPERLLHGEPQSIADTTVEAAAAATGDKPEEQTTNASGLSRISSQHRQGSWSTIRSSRLRLFPSSNHSDRPSPSPLSPADSRGSQTSARTTVSPTRGLSSESSDSDHRYPPYSSLNHSVESAKSPHNWSLPSLSSVSSWVKAPPRLLLQAATSPSLRNASNTKNPCRKIVETISRGPKSASSLGPETDYSLGLEHQETEDASNADEDDEDEKRDERVRKAFGLSEKEHTLAHFSGFLYRGVPIYGKMYITTSFLCFRSISLLAHANMCLPLAEVIGVSHHRSYRIGYSGMVVTIKGHEELFFELHTSKRRDTCMQAIEHQVEFIHKELSEGKTPGDTLAYQEHRTLMDLAASKASDSSEPRPQSESKEGQPPVMFNSTTSDFVTFKPEKSLKFTCMTIGSRGDVQPYIALCKGLKAEGHKVKIATHGEFKKWVEGHGIEHEEIGGDPAELMQLMIAHDFFTIAFMKEAVGKFRGWLDDLLETAWKACQGADVLIESPSTFAGYHVAEALRIPYYRAFTMPWSRTRAYPHAFAVPDRKMGGSYNYMTYTMFDQIFWRATASQINRWRRKTLKLGPTSLEAMQQHKIPFLYNNSPVIMPPPLDWRENIHVTGYWILDNPDDSSSSRWEPPQDLLNFMNEAKEKNKKVVFVGFGSIIIPDPEGMTRTITAAVEKAGVYGIVAKGWSERAASKHDSEEEKQRLKEQEKKQAEVLKKPFIYNIKSIPHDWLFPKIHAAVHHGGAGTTGASLRAGLPTIIKPWFGDQHFYADRVQTLGVGTAVRHLTVETLASAIHKAVTDEKQIDRAKLAGQQIRKEDGVGTAIECIYRDLEYAKSLIPPPPHVLKRKSTDSAGHQDVIAKQADQTAKSSPINPSSSDEASWDVVSGGGSGSASGRGERWDDDEMSELGSTPTKSRGASETRHPSDQGSVPAPIALTTKVLESLGVTSGGSSPK

SEQ ID NO: 7707 - protein, 1498 aa, Microdochium bolleyi
MAPLALDEESSTKRRVSKKLRKTRREGHQPTMELPERFRDDGDDNEEDVRPANNGAQGFMNMNQSIFGLIAAAGSTVDFSDRFDGQSSDEDDEDADSHDSADTKKHAPPGTSSGAHTIVLPKRSDSTDKKEKHHRRSLSGNLLRSLPHLPKLASRSLRKSSKLRSSQLSSDGAKLPSSFSSSQQDSGALSPPLQSPIEEKDRDGARLAPVMSRMLEARAEMSSRPSFDLERRSSDFRRGDDGPSALASKLKEIFDFEQDEEVIQEYPCWLLQSVLMQGYMYITDKHICFYAYLPKKAHEVAKSGYLSKSGKRNPKFTRHWFRLKGDVLAYYRNASNLYFPDGQIDLRYAISASITDKDKDSLHFSVVTHQRTYNFKADSAPSAKEWVKSLQRVIFRSHNDGDSVKISLPLENVLDIEDSQMVEFADTCKIRVIDNDETYAIDEYFFSFFSFGKEAINALKATVEAPVSGKKSKKLRLQINNGSLPGSPLATSAAGSRSHSPAPRGELKSPKLRDHVKATLSPVVPAEASSPRASGDFSRASFDAIRHIGRRSMDLDTAAREASQSKTQQARRSFSASRSLSRSRRPDQSAHTDKLASSESYVQSIEDPSGTSGMIESSNESPSGSQILRGSEVFHSPTLPRRSASGSPAPGHSKTAHRRSQPLKSEPSALRAPGSKAGDTSEDGEVQSLQNLVKMGAYPLQRAGLFANYLNQTSKRMSNLLATESMGYVEKVSGMWKGGRKHYTEQPGLKTEDDEAEDDDDESQVAGATERFQQHFALPPTEKLQATYFGHILRVLPLYGKIYISDRHFCFRSLLLGTRTKLILPLKDIETVDKEKGFRFGYSGLVVVIRGHEEIFFEFNQAEARDDCAVTLHHSLEAARYLRDSETLDKEEKEQAEEAIAERDALNEARLLQNPEHELKLPQPTELGDSSPTILFDDPKASFLNFKPSEPMRITCLTIGSRGDVQPYIALCKGLLAEGHKPRIATHGEFKTWVESHGIEFAPIGGDPSELMQLCIQNGTFTWAFMREASSKFRGWLDELLASAWEACQGSDLLIESPSAMAGIHIAEALGIPYFRAFTMPWTRTRAYPHAFIMPEHKMGGAYNYVTYVMFDNVFWKATASQVNRWRRNLLGLPSTNLEKMQPNKVPFLYNFSPSVVAPPLDYSDWIRVTGYWFLDEAGTWTPPDDLREFIEQARKDGKKLVYVGFGSIIVPDPARMTQEVIDAVLKADVRCVLSKGWSDRLGDNKASAAPEVPLPPEIFQIKSAPHDWLFAQMDAAAHHGGSGTTGASLRAGIPTIVRPFFGDQFFFGDRLEDLGVGICLKKWGANSFARALWEATHSDRMIVKARVLGESIRKESGVETAIQSLYRDLEYSTSLIKSKTGKNAAGGAGDSRMSVDGNSGDNEDDEESWTFVGGGDEADLDFVSKRSSLGGGGAGSPEHTFHGKLESSQSSAGSRALGSKVLGGGSGVGAMRSPGGSSPVATLTHGRSSAGTSRLTS

SEQ ID NO: 7708 - protein, 829 aa, Botrytis cinerea
MEDGKGKEKHDYNKNAQGPPDHYGDSEGVIANGNWHEADNASNASQDLDWEKPPAYEFHGSGPNIKTSVVAQDDGRVAINFIATEKIPIPIPTEPKSYTPPNIANSKSPFLNIVIQIVGSRGELCDIQPFIALGNALRTAGHRVRIATHDVFRDFVKATGLEFFPIGGDPASLMAYMVKNPGIIPKFETIMSGEIPQKRKMVYTMLEGCWRSCIEPDLETNIPFVAEAIIANPPSFAHIHCAEALGIPLHLMFTMPWSPTRAFPHPLANIERSDADLRTTNYLSYALVEIMTWQGLSDVINLWRKKSLSLERIPMTTGPLLCDTLQIPFTYCWSPAFVPKPADWPNYLDVCGFFFREEPDYTPDSELANFLRDGPPPVYIGFGSIVIDSPEKLTNILIKAVRACGTRAIISRGWSKLGSALGEHANPDILFLGDCPHEWLFKHVSCVVHHGGAGTTACGLLNGRPTAIVPFFGDQAFWGQMIAAAGAGPLPLHHNSLDHENLTQAIQYCLTPAAMSAAAEISERMRQESGVQRAVQSFHTNLPVDALRCDILSNQAAVWQYSSKSKKGPKRSAKLSDEAAFILVEHKKIDPKLLKLYQPKPVSIDNLRWDPVSAGTHVLLSTMTNFTLGFSEVFTGPAKAFQSKENGGGGKEAAKTFGKGFGKMVGVLPKATLVDFPLALTEGLHHMPRLYGEEVRDHGKVKDWRSGGIVAGKNFGYGFMDGLSGTITKPYKGAKEGGWAGFGKGVAKGAMGLVTGPGSGMFGLFAYPFLGMYKSIATSSLSPTEKKIILARQVYGSYMATERERIKEGGSSGEEVRVLVEWERLKVDV

SEQ ID NO: 7709 - protein, 1158 aa, Fomitiporia mediterranea
MTRSSSLATVRVKRRTMLAEKLKDVFGIAEINEVVAEIPCWLLRSILLQGYMYLTNSHLCFFAHLPSREDQVLKSGSLNKKTQRTKRWVKHWFVLKNDVLSWYQSSSDPYFPHGVVDLRYAISCETMQEKSFRIRTNQKVITIMADSVPSRDEWVKAIRKVIFKAQNVGESVKIAIPYSVIVDVDRSSAMDFSETIEVKVIDQEEKPSVGSYDSYFFAYFHNVSAALDQIRDAVKKYKPFSHGIPPINEVVHDTTHAAASSDRAGSIQAEQSNKNGYGLKFPSFLRPFQSDSGPISSTPTQSSIQPKVQDTHSSRSSYQFPPAVSTESATQGSQLDVPASGSMKSVNTVHTYPPPPSPPSELTPIASRESSGTTSSWGMPNWLRSPRRAFVTTSTSSSLGTIGQKGVFEVVSGPSSSSRTIDRGLSDFGFSVLEPKNVAEPDVVEKFRTTFAFDEKEQLLGYFPGYLFRLLPTYGRLYISTNFFCFKSSGPLATRTRMQLPIRDILSLEKTKAYRFSFVGLVVIIKGHEELFFEFNSSDRRRAFVSLLERQMEVVQARDTSGEMQNGHNAKPDALLLDEIEPAALFGDEDPRIPSDSTAEDLPAVMFTSTSSTFLTFKPRHPLHFTCLTIGSRGDVQPYIALAKGLMADGHKVRIATHGEFKDWIESYGIEFGYVGGDPAELMRICVENGMFTVSFLKEGIQKFRGWIDDLLKTSWEACKGTDVLIESPSAMAGIHIAEALRIPYYRAFTMTWTRTRAYPHAFAVPEHKMGGGYNYMSYVMFDQVFWRATAGQINRWRRETLGMSSTNLDKLEPHKVPFLYNFSPTVVPQPLDWPEWIRVTGYWFLDDADVSAEKWSAPKDLVDFIDSAHQAGKKVVYIGFGSIVVSDPEAMTRCVVEAIIRSGVYAILSKGWSDRLHLKKGADVSEPEVPLPSQIYTIKSIPHDWLFKRIEAACHHGGAGTTGASLRAGIPTVIKPFFGDQYFWGDRVEALGVGSCVRKLSVEALSEALTLATTDEKQIAKARLVGERIRSENGVATAIESIYRDLEYARSLVKAPRRSTSADEDETIRERQRPSSASISTTISSPQSITDSYLEAQEAQSEDWSVISDSDDRRSSRNSSDLRTHSPNSKRNSLAAVVLSVLPDALQPGSPKNNPRT

SEQ ID NO: 7710 - protein, 1474 aa, Colletotrichum spinosum
MPPPPLSLPLHGPAGAASVTFAGDEDVKKRVGKKLQKKRHEPTTPAVELPERLKEGDDAGEEDLVPTQGPPMFMNMNQSIFGLIAAAGSRVDFHDRFESSDDESADEGPQRDSADRSHSSSTHGLFLHRKQRRRDESDVAKTTVLNKDPYGSGKPEKHKRKISGHKLLRSLPALPRLPRHKSKKESSKLEPPSEEASDGSGFAQSQPVDEAEDDEDDKDHRLAPVMSRMLEAKAEMSARPSFDVERFSSDQLTYSESADSNDTALARRLQDIFEFDQPEAVIEEYPCWLLQSVLLQGYMYITAKHICFYSYLPKKALEVVKSGYLSKSGKRNPKYNRYWFRLKGDVLSYFKDPSNVYFPSGQIDLRYGISASVTDKKDGLNFTVVTHHRTYHFRADSAPSAKEWVKSLQRVIFRSHNEGDSVKISLPIENVIDIEDTQMLNFADTCKIRVIDNDETYAIDEYFFSFFSFGKEAISVLKILIEDASSTAKDAARLKAVQEEEDRQQQQQQHPMQQPMQASARSSMSGSRRAIAPPKLTTNKLPEAVKATLSPMSAHSPSALSPRASMDAARASFDAFRSFRRRSLDLSTIIRDSSPRRSFSGNRRSMSRNRLDDQRRGPHQQGSTDSYVQSSMEDPSFSGMVASSIEDPSASQILRGSDVFQNPTMRRSGSASRTEVEKQQRRDPRSPPTLATYSGQHAATAGSLNDGDKQPVTPTLQSITKMGAFPLQRVGAFAEYLNNTSSKLGSMLATESMGYVEKVSGMWRGGRKHYDAPPEIKTDDEDLYEDAEGKIQTSMDRFRAHFALPETEKLQATYFGHILRVLPLYGKIYISDKSFCFRSLLPGTRTKLILPLKDIENVDKEKGFRFGYSGLVVVIRGHEEIFFEFGQAEVRDDCAVTLLQSLETTRYLEKIGDLDTEEREDEENAMAERDALKEARQTEEFHDHDVHLPKETSGVSDAPTILFDDPKASFLNFKPPQPLKITCLTIGSRGDVQPYIALCKGLLAEGHKPRIATHGEFKDWIEGHGIEFAKVEGDPGELMRLCIENGTFTWAFLREANSMFRGWLDELLVSAWEACKGSDLLIESPSAMAGIHIAEKLSIPYFRAFTMPWTRTRAYPHAFIMPEYKMGGAYNYMTYVMFDNVFWKATAHQVNRWRNNTLKLPNTSLEKMQPNKVPFLYNFSEYVVAPPLDFSDWIRVTGYWFLDEGSDWVPPQELTDFIAKARADEKKLVYVGFGSIIVNDTAKMTQEVIDAVLKADVRCILSKGWSDRMGKQGEEAVDQPVMPPEIHVIKSAPHDWLFSQIDAAAHHGGSGTTGASLRAGIPTIIRPFFGDQFFFGSRVEDIGVGICLKKWGAISFARALWEATHNDRMIVKARVLGEQIRSENGVDSAIQCIYRDMEYAKSLIKRKAGKNIQVEPDEDEESAEESWTFIGNDEPDPDMTTKKLSEMPTLPGSSDTKPLGTRIMRVSPSQQSVA

SEQ ID NO: 7711 - protein, 1392 aa, Verticillium alfalfae
MAPTHPSLPAISTALSPTTASPNSAQPTPTPTDEDPKRRVARKLRRKRRNETYAMDLPERLKGGNDSEDEEDLMPAGNTQNGPPMFMNMNQSIFGLIAAAGSRVDFHDRFEGQSSDDDDESGHQTTKPDKHTATSPEPESNPVQNDRHGPKRLRNAVIVGPARQATSLPALFRLCLASGNGGPRKNRQSWSPPSEDASESSVPQSSLHESAEEDQDQYKLAPVMSRMLEARADVASRPSFDLDRLTSEHSRRDSSDLGPSPLALRLAEIFEFTKPEEVIEEYPCWLLQSVLLQGYMYITARHICFYAYLPKKATQHEVVKSGYLSKSGKRNPKYNRYWFRMKGDVLTYYRDPSNVYFPSGQIDLRYGISASITDKDKAGLHFSVTTSHRTYHFRADSAPSAKEWVKSLQRVIFRSHNDGDSVKISMPIENVIDIEDSQMLQFADTCKIRVIDNDETYAIDEYFFSFFSFGKEAINVLKIMFEGASAETKDPADLPKGASARTSIAANRRSIGPDKIGIARLPENVKATLSPMSPTSPLGPSPRPSADVARPSMDAFRVFGRKSLDLSSVTRDASPRRSFSGSRSHSRNRLEDSRNTVDKNESSDSYVQSSMEDPSFSAMAASSNEDASASQILHRSDVFQSPTMRRSGSRTRQSSKKTVQGTQSPPALATYSGQHAATTGSIADDPNKGPSLQSITKMGAYPLQRVGAFAEYLNSSSRRMSSMLATESMGYVEKVSGMWKGNRKHYDAPPETRTDDEDLYEDSEGRVQLSTERFRAHFALPETEKLQVTYYGFLFQVLPLYGKIYISDRFLCFRSLLPGTRTKLILPLKDIENVDKEKGFRFGYSGLVLVIRGHEEVFFEFSQRDAREDCFGHLLKSVERSRFLHNSGMLNREDKEDAEYALAEREALKEARQDEFHDHEVKLPEQTSCLSDAPTILFDDPKASFLNFKPAQSLKVTCLTIGSRGDVQPYIALCKGLIAEGHRPRIATHAEFQPWVESHGIEFAKVEGDPGELMRLCIENGTFTFSFIREANSMFRGWLDELLVSAWEACQGSDLLIESPSAMAGIHVAEALGIPYFRAFTMPWTRTRAYPHAFVVPESKLGGAYNYMTYIMFDNIFWKATAGQVNRWRNKTLKLPNTNLEKMQPNKVPFLYNFSPSVVAPPLDFSDWIRVTGYWFLDEATKWEPPKELTDFIAQARADDKKLVYVGFGSIIVNDTAKMTQEVIDAVLKADVRCILSKGWSDRVASSGDAGTDDAAATSKREEPVMPPEIHVIKSAPHDWLFSQIDAAAHHGGSGTTGASLRAGIPTIIRPFFGDQFFFGNRVEDIGLRACSVEATHNERMIIKARVLGEQIRKENGVESAIQCISRDMEYATSLVKRKGDKNRKGSPRPAG

SEQ ID NO: 7712 - protein, 1168 aa, Geotrichum candidum
MIKHFSFNSQKDSPKLETSKSDDSEKRASSQDLASQAGVSGQTFIELLTQSVRKDLSLNQNNSNYEGDDESVETLSQISVTSGDNKSLSPTSSTISDDSELKANQTTAIEDNGEKVLAPKPKTNENTEKEATSASEPDAKRSSSTTTEATPCQENRLRVQAISDTLRNKLGCGNATILAEYPCWLLKNILLEGKLFVTNKEVFFLSVLPKKHRQVIQSGSISISRRKNGHYNRYWFVLKNGTFSYFNSFTDQYFPVGFIDLQYAIKADAEVHSDGTLEPSTFRVVTEKHTYHFKTDSDTNAHEWVRALQKEIFRIRNEGDEVKIRIPLNNILDLENIKVLSIIDALRLRVVDSSETYNISEYVLAFLHGIKSDEHPDQDIRDAMKDLGITELSTEDPEKIASHRQVLTISDSTYSGPSSPVNMSPPGTPRRSDSLPRGSSAQRSSSPGALSSIGRKVSRRLTNLVAPSRVTSHTRESNEHEDKHKVSSDDSDESPERLLKIPSFSLPNKVTEIMNTNTVKHFGRTRFPSGDKYLASEEEQKESTKHFLQHFSFESEELVASYHVYLQKGLLIYGKIYVSENYVCFKSIFPNTKTIMIVPNREIQDVLPESGCRFGHSGLVIVGQYQSEIFFDFNGERYRNDALDVIKKARAISKKRNPSIVPEVNEHVKQLRYARMLTYQDSVSDLSAKELHHTGIVETTFEAMTPERPARPLKFTLLTIGSRGDVQPYIALAKGLMKEGHSVRIASHAEFRPWVEKHGIEYAEIAGDPGELMKLMINHGMFSYAFLKDAITNFRGWIDELLATSWEACQGSDVIIEAPSAMGGIHIAEALGIPYFRAMTMPWTRTRAYPHAFLTPDIKKGGSYNYMTYVLFDNLFWKGISSQVNKWRKVSLGLEKTNLDRMSQTKIPFMYNVSPSVLVPPVDFSDWIHVTGYWFLDEGNEEFEPPKELVEFIEKARADNKKIVYIGFGSIVVPKPAELTKAVIKSVQAAGVRCVLSKGWSDRYGAKDNTVPEVELPFDIYQIKAAPHDWLFPKLDAAVHHGGSGTTGASLRAGLPTIIKPFFGDQVFYGSRVEDLGVGICLKKLNVSNFSKALIEVTTNEKMIAKAAEIGKDIRKEDGISSAITTIYKEMAYAKSLIKKEDLQSVESFESEEKHDSFLLRELEALKT

SEQ ID NO: 7713 - protein, 603 aa, Talaromyces islandicus
MPDNIGIEAPERHAGPFVADVIIANPPSFAHISCAEKLGIPLHMMFTMPWSPTRSFPHPLANIRSKDVKSSVANFTSYFFAEIMIWDGLGDLINHFRKKDLGLDPLDLSLAPSFIHKLKIPYSYLWSPALLPKPDDWSDNIDICGFQFLTSDTNYQPPQALQEFLDAGEPPIYIGFGSVVIKDPLRLTSTLFEAIRQTGQRAIISKGWSNIGADISGTPRNILLLGNCPHEWLFPRVSCVVHHGGAGTTAAGLLAVVQAGAGPPPVPYQKLTATNLASAINNAVKSLSKANTQAIGIEMRKENGVQSAVRSFHRHLNVNKSRFSICPNKPAVWWHRRSGIKLSACAASVLVDTGHVGTHDLVMYRPREYNSSRDPWGPLSASAGVLYSLVTDMIGGMVRIPVDILSLHYRKEQMERYRIHKLHDLAVMHFSEVLSQRVRRTENVEDARGASVPIEEHPENGNSSSRDSTTWNIPDTCSEDMDNNNNNNNNNNNNNNTMKITYMSTRQEQQPMTSRNKKFFTDASHYTQGIATELLDFVLRLPTDITLKTPKAGFTLPPGNLLESSMTGLLDSSYNPLELFKNAGVEVCYQELEKDLEGHFSSL

SEQ ID NO: 7714 - protein, 1396 aa, Torrubiella hemipterigena
MASSPPHTDADDDKRRNRLQKKRRDISTSTPELPERLQDSDESEAEDGAELTNAMTVNMNQSIFGLIAAAGSRVDFNNRFDGNSSDEDEGFSSSSKQQDLTQTTILSSPGRSKSRGHKKRFSTHKLFKSIAALPKLKSRKREPSKLSQAADGDDDHDEEDDGTMSPPAVTLTTNEHRLQPVMSRMLQAREELSTRPSFDVERGSADLSQSDDEDPSTQLAKRLMEIFEFDEPEHVIEEYPCWLLQSVLLQGYLYITAKHICFYSYLPKKENTVVKSGYLSKSGKRNPKYNRYWFRLKGDVLSYYHESTNLYFPHGQIDLRFGISATITDRDKECINFSVITNQRTYDFRADSAPSAKEWVRSLQRVIFRSHNDGDSVKISLPIENIIDVEDTHMIEFSDTCKIRVIDNDETYAIDEYFFSFFSFGKEAINVLKLLVEDTAGSKLIEREESDSRPTSAQPSHPATPNRSAINVDSIRMRELSENVKATLAPLSPSGANSPRASGELSPLDAFRHGGKSSHDSPRAMSSVMRENRPRRSFSGSRSGSRRRHAADKQTKLESSDSNLLLSSPDDPSCLSLATSGNEDTSASQILKGSDAFQSPTMLQPPAELLTETAMPVREKSGRMKHAATVPVDNLEDSQSREAVPSTPTLQSITKMGTYPLQRAGAFADYLNKTSKRMSSLLATESMGYVEKVSGMWKGGGKHYDEPAGLRPDDDDLEVDSDGKVQTSMERFRAHFALPETERLQATYFGYILRVLPLYGKIYISDRSFCFRSLLPGTRTKLILPLKDIENAHKEKGFRFGYSGLVVVIRGHEELFFEFRLSEIRDDCTVTLIQGLEKFKALQDAGAFDDEDDEEEDEYIAERDALRTARQEEFPDHELSEQQPPPGLPNAPTILMEGGDASFLQFKPSAPMKITCLTIGSRGDVQPYIALCKGLMAEGHKTRIATHAEFQDWIESHGIEFARVEGDPSELMRLCIENGTFTLAFLREANSTFRGWLDELLDSAYTACQGSDLLIESPSAMAGIHIAEKLGIPYFRAFTMPWTRTRAYPHAFIMPEHKMGGAYNYMTYVMFDNIFWKATAQQVNRWRNKTLGLPNTSLEKMQPNKVPFLYNFSPSVVAPPLDFSDWIRVTGYWFLDEGQEYTPPKELQDFITKAREDGKKIVYVGFGSIIVNDPAKMTREVIDAVQRADVRCILSKGWSDRLNPKDDPSKPKPEEPEMPPEIHVIKSAPHDWLFKQIDAAAHHGGSGTTGASLRAGLPTIIRPFFGDQYFFASRVEDLGVGVWVKKWGTNSFGRALWEVTRNERMITKARVLGEEIRKDNGVDVAIQSIYRDMEYARSLIKRKTGRRAGEAEDADDEEEAEESWTFVGGDEPDPDVVTKKLSEGLGKSLGSQVLAR

SEQ ID NO: 7715 - protein, 408 aa, Streptomyces stelliscabiei
MTAGSRGDVAPYTGLGHGLVRAGHEVTLVTHARFEPLVAGSGVAFHALPVDPRAELESERGRGLHRSSTGAGKLYRAAEMARRLVGRMAGDLETAARASDVLLLAGTVAPLGHAIARGLSVPSLGVNLQPLAPTREFAPPMTGVRSWGPVGNRVAGHAVNAAVEWIFTEEVRRLRTEYGLPRTGTVASRRARERLGRPVFHGFSPRVVPRPGDWRAGHDVTGYWWPYDRENRLPAPLLDFLDAGPPPVFVGLGSATVPDPERMSGEVVRALRAAGLRGVIQRGWGELRGEGEDMFTVGEVPHSLLFPRMAAVVHHAGAGTTAAGLRAGVPAVPVPVQFDEAFWAARLVALGVSPTAVPLRGFTPAALASALRRATTDPSYGHRARTLAGELRGEDGVQPVLTALDRLS

SEQ ID NO: 7716 - protein, 1574 aa, Debaryomyces hansenii
MLPKEDKVNSNHFKGVNDAHKTSLYKRLSSSVIPPLTFLNQNPASPNNEEVPGNNEANKDEKTFSDDEDIAHPIGSVGSSNNFLSFLYAGMGKLSDLKGNDASNANEAKDSKLNDNLRSSRNEQANEPEYRREYKLDYDIDESEEDDIESTRDENTLKPKTEDTSVHSKLDPEERLENVVNMLFDDHDESTTALASDPSKGTVFQQSVLKNFDPFRIQQTELLKLKDITLSTEEDESEEQKLKKKFFRLKVADKLKRVFELNDDDYFYGNYNVWLVRDVLLQGHIYLTKESILFFTFLPKRHNTISASKGTTGGFQHHDDSHDVIQSGSLGMKTALYGDTVFSTPLTHRFWVILRNETITVYHSPTDLYFPITLIDLKSCVRAEVIEKGRNDNASPRPDLHRNDSQEVSSGDEEVEFSNMLNSNYQLEDNSENVSGGYWFKVVTKKKTHKFHSDSLYSARQWVNNIVKVVFQLHNSNANNEVIMKIPINDVLSFDLNEVFGASEKNSDSNGGEEKPKVLNVKYLENGSKGRYALSASRMKKELKNKTKKKMKKNSGNEPDELLSENTYFLLFKDGDEVFSTLNEIVNENHHSSNIFRNRHNSISKKYTSEKGSNWNRPFTHKDEEIHIPRAISTLTTDHFQNSIIDQIEEASHRNTHTQNTDLASPRSECGLTHSVSTSPQSKIRKFGKTLITPSKIFSNKSRTESEKSTPDRSQTTSPVQGINLSLSGLKDLNMAFEASQKNYEVSCTRYSHTEENSTNSPSNFQNNTLSKADALSPQIKSPQPLEAGPLNLTDPSEYEDNKKKNSTLSSIGKSIKAMSSIRSKLAAVNHYEQLDENDTYFIRDVSAREVDTRHFQERFSFNNKKQLIASYHCHIIRAVPVFGKVYLGDSEICFRSMLPGVSTRMILPLIDVDTCSKEKGSNIAYSGLVLVIRGYDELFMEFSVQSARDDCLAMILRQLEKNRESGNESSDDNKSAQHGKSGCFQKTPSSAETTKSSNEIKLAQWRIENARLKLFEDKINAAAGLHVPIVLEDSPFYKTEIRPSTSFNFTLLTIGSRGDVQPYIALGKGLLNEGHNVTIATHSDFEEWIVGHGIKFKTIAGNPVELMSLMVTHGSMSLSFLKEASSKFRGWIQELLDTSWKACQGSDILIESPSAMVGAHIAEALGIPYIRAFTMPWTRTRAYPHAFIVPDKKKGGSYNYITHLMFETVLWKGISSQVNKWRRESLGLPRTNLYRLAQYDIPFLYNISPTIFPPSVDFPDWVKVTGYWFLDEGAADDFEPSKELVEFMNKARADDKKVVYIGFGSIVVEDAKSLTKAIVEAVLNADVRCILNKGWSDRNSSPAKDNAEPEVELPEEIYNSGSIPHDWLFPKIDAAVHHGGSGTTGATMRAGIPTIIKPFFGDQFFYSSRIEDIGAGIGLKKLNARSLCTALKTATSDAKMITKAKKISERLKQENGVLNAIEAIYYELEYARSLILAKQHENTKHDLKSGTQTPVVNETNEYFDSDTYDADHDSDKESDHDQTYEQDNHSDYDVANDDNMTEIVEPSLEDGNDTVRIAPDSGNDNTTVTDANK

SEQ ID NO: 7717 - protein, 1577 aa, Xanthophyllomyces dendrorhous
MSQSESDAGRLHRPNDLEGMHRDFGSVRAGTQSLVQAMSAVPWDDADDSDSSGSDDEGETVSVEERRTGSATYAPQSDPAFGSGQAVHEKTNPMRPTHSSRMSSSIHTIHRPVAYSRAISESRTPMLERNKPSFSGHTDASGFKKDHTLPSFHHTDPYLSHTVNPGQHSNQNLDKVLFSHRENGVEKFQADNPTADEQDYEHQTSDKSILHGTREGENVEKEEADGDRAEEELVKGDSIQDESHEQEARSLMSRRHPDKNANTDEHSSIGRRKRKQKLAEKLRDVFNLPDVEPVLGELPCWLLRSILLQGYMYLTTGHLCFYAALPNNAEVSAPNPDLFTSSRAPSTSYASNVIFLVNHIQHKVIKSGPLIKKSRKSLRANKYWFVLKNGVLSWYTSSADPYFPQGNVDLQYAVECEPFGEKALKLSTNRKTLQFSSETVAGRDEWVKALQKVIFRTQHEGENVKIAIPLQAIVDVDKSSNMDFAETIEVKVAEGDVTLAVDSYFFAYFSDLEGSLRKIREVVSSYHSPDARVDLRGTIDSNREHVFDSISEAAQKKRSISQNYPDPTEKSPSTLSSIKSALLHPFGSDKSKNNDAEPLTSGISPRPSSTGSDLLLSTSPLSSVISSRSSSSVGVGITRVGSKDEHVLSEPFTGTPGMIDRSVTPTPADSHRYPPIPVQSDLKQTPTSSSVSSSWSASNLLNRSSTKSSSTTVSSTKTKTSSNPIVSLFGAVKTSRFKPFSTSARQEDLTTGHEAQGLYETVSPKVEIEGDMTGRASEDSSNEDTADYSLMEKSETADQQAEDVSKAFHEYFALDKNEVLIEHLPGFLFRVVPVSGQVYISSYHFCFRSTQMLSKTRMIIPLQDIISIQPQKAFRFSHQGLAIIIKGHEELFLEFSSTKKRDLCKRLLDKQIEEVKTGRVPKPAHEGPSAAMKREAKVLSDLDAKDMNSPTDSNSASTSLETTDNLPPVMFTSASSTFLNFKPKKSLHITCLTIGSRGDVQPYIALCKGLKAEGHRVRIASHGEYKDWIEGHGIEFGYVGGDPAELMRICVENGMFSVSFIKEGLENFRDWIDDLLQTSWKACQNTDLLIESPSAMGGIHIAEGLGIPYYRAFTMPWTRTRAYPHAFAVPDHHRGGSYNFMTYTMFDQVFWRAISGQVNRWRKKTIGISSTTLEKLEPHKAPFLYNFSPTVVPPPLDWYEWIRVTGYWFLDDPEDSSEKKWSPPDGLLEFIDKAHEDGKRVVYIGFGSIVVSDPDAMTKCVIEAVLDSDVRCILSKGWSDRLSAKEDDTQKSEKQKEKEKKEKEEKAKKEAASYPPEIFSLSSVPHDWLFPRIDAACHHGGAGTTGASLRAGIPTIIKPFFGDQYFWADRVEVLGVGSSVRKLNKEHFTAALKTATQSEKQIEKARELGKEIRAESGVANAIQAIYRDLEYARSLIKGPTRQTPPDASSSSSPESSPSNSPRSGPHELPSVSLDDTPDDSDNEVVFRPASSTTSAGNSAKTSSKMTSGTGFAPADAHVSGSSTGEENSDDSWDMVHNDGSHSRSNTTRLAMQSEGNESGRTTLNSLGLGAVVNMFNK

SEQ ID NO: 7718 - protein, 815 aa, Rhizoctonia solani
MASSTYAGYSQAKSEDYPRGYKDWILPYAYDSPPYEQAGPYSQGHRVYHDSDDDTLVQSVTSFGSINPTLGTHTGPGVETSFHDNGRVSMAFSHAFDKPLPKVYGAPVQEVGVDESGFADAPPMNVNIMIVGSRGDVQPYIALGQRLQQHGHTVRLSTHETFRRLVKDAGLRFFNIGGDPHELMSYMVRNPGLIPGFKSMTNGDIGKKQKMVAEILERCYLSCFEPDDDTNAIFVADAIISNPPTFAHIHCAEALGIPLLLSFTMPWCPTAAFPHPLVNVLQNGKTEANVLNYYSYALVDLMTWQGLGRTINKFRTRRLGLQYLSSASAVGMIERCNIPWTYCLSPALVPKPNDWMNHIDVVGFYFLDLAKDYRPPRDLIDFLNAGPPPIYVGFGSIVLDDPKGLTNTILSGIAQAGVRAIISPGWGGLDEWMIKSAGPHIFALGNVPHDWLFQYVSAVCHHGGAGTTAAGLKCGKPTIIVPFFGDQPWWATQIAHRGAGPAPLDHKTLTPEIFSSAIRIALSPVALNAAREVGRMIMREDGAGKGVESFHRHLPLLNMKCDLAPNRVAVWHSVKYKLRLSAFAAQVLAEVGHIKLKKLKLHRSREYDPYVEAVDPVTGTIVPALRSLNDLGRGLVKVPTKPGRGIAQVARASTMAVQGTLQGAAEGVSNMPKLYGSEVREHKRVTGLGSGIAEGTKGLVLGIYDGISDFVTEPIKGFKQDGIYGGVGGLCVGTLNLAAKPAGGALQFVSKPIEGTVRSFAHKETGRDRIVARRAQGIVASELATLQERNEVIEAFVEYKAKRKRDRKGKGKAVA

SEQ ID NO: 7719 - protein, 1396 aa, Trichoderma atroviride
MATTPTPRRGSLGGDDDAGLPRIADTPADLRRDDSTLTAELPEPLQGSDDDTSENVGFAQTSPMAVNMNQSIFGLIAAAGSRVDFNTRFDDGSSDEDDGEGEDEEGSRLKPLGSRHRDLSQTAILGSFPAKDKRLGHKKKLSGHRLLKSFASLPRRKSGRGSGKMWEPTEEVDEPSESSQSPSPKKPSQQLEEEEEDLRVAPVMSRMLEAQAEMASRSSFDIDIERDSSGPDRTDEGEEEGEEEGEASHVTALARKLMEIFDFDEPERVIEEYPCWLLKSVLLQGYLYITSKHICFYAYLPKKTQSVTKSGYLSKSGKRNPKYSRYWFRLKGDVLSYYQDSTNLYFPHGHIDLSFGISASVTDRDKEGVHFSVVTSHRTYNFRAESAPSAKEWVKSLQRVIFRSHNDGDSVKISIPINNVIDVEDSQMMEFSDTCKIRVMDSDETFAIDEYFFSFFNYGKEAIDVIKDLVEDASAEGPTAGKAIAKQEESSNPSSPRAPGSAFRNLTRVDSALTTKLGPGLVADHSTSRSSTKRDSHDEDSRGRSSDNKRSEGSHQGEERISSRMLESSESNLYSSMEEPSFASLNESAFEDPSASQILRGSDVFQNPTMRHSQSSIRDDKESDLQPAVSTPSHAEGSGYAGSVDLPRVSTPTLQSITRMGAYPLQRAGAFADYLNKTGKRMSTLLATESMGYVEKVSGMWKGERKHYDEPAGLRPDEDDLEEDDDGQIKTSNERFRAHFALPATERLQATYFGYIMRVLPLYGKIYLSGGYFCFRSLLPGTRTKLILPLKDIENAHKEKGFRFGYSGLVVIIRGHEELFFEFRQAEIRDDCAVTLLQCLEIDRNLQGSGLLSLASKEEANAAIAEREALKLAGQETFTDREPRVPQSTTHAANILGDDLETSVIQFKAPHSMRITCLTIGSRGDVQPYIALCKGLLKDGHKPRIATHAEFQGWIESHGIEFACVEGDPGELMRLCIENGTFTLSFLREANATFRGWLDDLLDSAYKACEGSELLIESPSAMAGIHIAEKLGIPYFRAFTMPWTRTRAYPHAFIMPENKMGGAYNYMTYVMFDNIFWKATAHQVNRWRNKTLGLPNTGLEKMQPNKVPFLYNFSPSVVAPPLDFSDWVRVTGYWFLDEGGDYEPPQELRDFIQKARADGKKIVYVGFGSIIVNDPAKMTQEVIDAILKADVRCILSKGWSDRITGRDEPTRPLAEEPVMPPEIHVIKSAPHDWLFRQIDAAAHHGGSGTTGASLRAGIPTIIRPFFGDQFFFASRVEDLGVGVWVKKWGTKSFGRALWEVTRNERMIVKARQLGEQIRRESGVETAIQSIYRDMEYAKSLIKHTDGHLETEEDEDTEESWTFVRGDEPDPDVITTKLSEGLEGVALGNNSKASGKA

SEQ ID NO: 7720 - protein, 1424 aa, Laccaria amethystina
MSTLKSSLQPIDTSEQALGIATHADDKPPDSLQGQSRAKRLSTAVEKTVDKLSRSVGGKSALSPSSSPSTRRLFSLSRKVKGHTSAENEGSSFSPSAIPRSSRLVQSATMVPDDSPFIVPPSPPLRPSLSPFRGDGSMRAGTQTLIQALQALPWMTADNDDESNALSPMDMSSDDEDQRPQFQLSSSIHTIHRPLARSRRLSIPDLPKHGIQAHSAVIEEELAPDDTVVSDEEIEPDFEDTSHPSTERPPLLSHQFIPPSTPVETHDSTLFKSMMTRTGSMATVKLHRRARLAEKLRDIYELDDIQEVWAEMPCWLLRSVLLQGYMYLTNSYLCFFAHMPTREDQILKSGSLNKKAQRTKRWIRHWFVLKNDALSWYQSSSDPYFPHGIVDLRYAISCDAVGGKDFRLRTNQRTVILSADSVPSQEEWVKAIRKVIFKAQNMGDSVKIAIPYSVVLDVERSSAMDFSETIEVKVVDKGEQEHYSVDSYFFAYFHDLSAALEQIRDVIRSHRSFPEQETYPTLLDTTVSRSSPPSLQPSTIPLDISLPKAVSGFRLSSLLRPLSDTLSLGRSGSNILPETQGDEYTHISRRGNSSFIPITTSPKSTFSAAQDNIEPRQDPSKSSLQSLPPLNHTYPPSTSRASTYPNESSLSRDSTNSWNVGVPSWFKSRRVFGALACNNRDSPFDSAGVKEVYSVATVSSPGPINRSGGTGDMAFSVLETPDIAVDQEATDKFRAAFAYDEKEILLGYFPGYIYRLLPVFGRLYVSTNFFCFKSSGPLTSRTRMTLPIRDILALEKSKATRFGHHGLIIIVKGHEELFFEFGAEDKRAVFVQLLENQMESVRKRMVAGTSAITSPGKRDALTLEAFETRTSIGSDSDPPPPLDNMSDSLPAVMFTSASSTFLNFKPHKSLRFTFLTIGSRGDVQPYIALAKGLMADGHKCKIATHGEFQAWIESHGIEYGYVGGDPAELMRICVENGTFTVSFLKEGLQKFRGWLDDLLKTSWEACQGADVLVESPSAMGGYHIAEALAIPYFRAFTMTWTRTRAYPHAFAVPERKMGGSYNYMTYVMFDQVFWRATAGQINRWRRDLLHLGPTSLDKMEPHKIPFLYNFSPHVVPPPLDWPEWIRVTGYWFLDDADVSSKKWTPPRDLIDFIDNAHQSQKKVVYIGFGSIVVSDPKTMTRCVVEAVLQSGVCAILSKGWSDRLHVKSSDDVESEETLPAEIYPISSVPHDWLFQRIDAACHHGGAGTTGASLRAGIPTIIRPFFGDQMFWADRVEALGVGTGVRKLTVQSLTEALVLATTDQKQIDRAKSIGEQIRGEKGVSTAIESIYRDLEYARSLIKRHRNEESDGEAETDLSTIRNHDHRVSYSSESYSGYNSSGSVRGAPSEEWSVISDQDDRRSSIGSRRNNKGKRASQRRPLSTSP

SEQ ID NO: 7721 - protein, 1441 aa, Gelatoporia subvermispora
MAEDAPARPPAPRDNSEGSSSSNSTVYGTGRRTESTNDSRGGIIRRAVGMTADRLGRSGSLGKAQLSQSQPTLPTQAPRRLLSLSNKAKGKEKAHTTDSAVHEGDTPAASTQTSTSLAPTLAAAYRRKQHTSTTGEEDSPFITPGSPPLGPSRPDLFRGFGSMRAGTQTLIQALQALPWIEDQDNDDDVVNHDITPTENESDEDDKHGNWLASSIHTIYRPLARSRRGDAQRRSRTSNLSTLSDNEDVPSSQEPEQETIMSEEEIGEDFEPTTPGPSELEPDTHARTLRKPLDTLPELEALDTSVSRGAQTRSGSMATVKLQRRARLAEKLRGVFELDDIHEVIAEMPCWLMRSVLLQGYIYLTDTYLCFFAHMPSKEDQVLKSGSLSKKAQRTKRWIRHWFVLKNDVLSWYQSSSDPYFPHGVVDLRYAITCEPVNDKGIRLRTNQKSIRLTADSVPSRDEWVKAIRRVMFKAQNMGDSVKIAIPYASIVDVDISSAMDFSETVEIKVVDQKEHSFDSYFFAYFNDLPGALEQIREAVRAQREGPGSLLTPHVIDTTTTRPSSQLVDRAQSLPATDSIPKSQSVFRLSSLLRPLQDSFPISRSSSAPEPETEEFTHVNKRGNSSFFAVTSSPKAIPQTTLSGRPGEVDVPDMALDASYHTYPPSPSRSPSSADLHTTPIATKEGTWSVAVPSWLRIPSRRMFSSPVATRPTAEHASMPPPDVGTVPVSEVLTSATSGSSRHGSGAGSGDYGFFSILEAPAAFLDADSVEKFHSAFAFDEKETLLGIFPGYIFRLLPVYGRLYISSNYFCFRSSGPLTSKTKMILPIRDILHSEKSKAFRFGHHGLVLIIKGHEELFFEFSDEDRRSAFIALLQRQKEEVQRRLSAGDTQDPSSATEALILEELGPRKQLSPSSEQSPQPASDAMSESLPAVMFTSNSSTFLTFKPKRPLHFTFLTIGSRGDVQPYIALGKGLLAEGHRVRIATHGEFKEWIESHGIEFGYVGGDPAELMRICVENGTFTVAFLKEGMQKFRGWIDDLLKTSWEACQNTDVLIESPSAMAGVHIAEALKIPYFRAFTMTWTRTRAYPHAFAVPEHKMGGNYNYMSYVLFDQVFWRGTAGQINRWRRNTLGLPGTSLDRMEPHKIPFLYNFSPTVVPPPLDWPEWIRITGYWFLDDADVGSKKWTPPADLQQFLDDSRAAGKKIVYIGFGSIVVSDPKAMTKCVIEAIVESGVHAILSKGWSDRLVKNAAEALVPEEPLPKCIYPVASIPHDWLFQKIDAACHHGGAGTTGASLRAGIPTIIRPFFGDQFFWADRVEALGIGSAVRKLTVENLKQALITATTDIKQIERARNVGEQIRSEDGVATAIEAIYRDLEYARSLVKGGPSDTHPDEHDAEHATIRDFDQHSTPERSRTRSQGSSVSSPRGAASDWSVISDQEDHHP

SEQ ID NO: 7722 - protein, 916 aa, Rhizoctonia solani
MDKPDTPYHMREKSASNIVPKTSETDSTRYSNDENTTKVEIGSISTSPAINYASYKALGKGLTSSANMTPDGRIVITLDLHKKLPDLPKNYANPVREYAVDRVDWHVAPPMNIVIMIVGSRGDVQPFVALGKRLKEHGHEVRIATHGTFRSFVTGAGLRFFDIGGDPEQLMSYMVRNPGLMPGLESLTNGDIGMKRKMVAEYLDGCWKACYEPDEDEDQLSFAADAIISNPPAFAHIHCAEALGIPLQLSFTMPWCATADFPHPLVNILQSNAGKGLTNVLSYALAELMTWQGLGDVINDFRTKTLGLKPLSLRSGAGIVDRLRIPWTYCMSPALVPKPDDWTNHIDVVGFYFLDLASNYQPPDNLKKFLDEGEPPIYIGFGSIVIDEPQEMTQKIFDAIRETGTRAILSAGWGGLFAPDSPNVPEGVLILDKQTGNIPHDWLFDHVSAVCHHGGAGTTSAGLKAGKPTIVVPFFGDQPFWGAMIARAGAGPEPIPQDELSTRKLIAAFEFVKSSRARGAAERMGRQIQNESGVMLGVDSFHKHLPLLNMRCDIDPHKLAEWWSPEYYLRLSGFAVTVLINAGLLDMKKLQRHRTKEYETHKKATDPITGGSIEIMRTVTHYYAGIAQIFYSPIKGIINTTTAIPRGVMNIIGSVSEGFHNVPRIYGSEVRERGPVNDFSSGITEGAKGLFHGYKDGITGLVTEPLAGAKKEGFIGFIKGSGRSYINATMKPAAGIVGMISNPIDGAWKSIQKPWAKKQDSRQLAVRVERGRRAYEASTEEERQGVINAFKRLTKRNATLDRKKTMEAEAKEMLQTDASRKLTLSDDQGGSDEEAGPSNPRPMVHPVRSASPDHFAHSEDEKAPRPPPLPPKGPPQHNTEDEEAAFQHDLDLAIRLSLAEQQGYERGLKAIAEANH

SEQ ID NO: 7723 - protein, 686 aa, Cephalotus follicularis
MTKKPLNVRSRTVELRCVAWRFSQKKDRKKNPSNECLHTLSLSLSLVFSKSNLHRFSESKHKRFSFSLQIDLDRERRQNHQVVSSPAAMAESPDNHSKSSSTSYSEVTVEIGSGSSSSVDCKASGNGGGGGSVNNGGTGSSGTGKLESTSCQPQLERSKTDRQRHPNILAEETAQIFDDKISVQQKLKLLNRIATVKDDGTVEFEVPGDVEPQVLHVGTEDVYNEVVDDEPLDATDLQYIPPLQIVMLIVGTRGDVQPFIAIGKRLQDYGHRVRLATHSNFKEFVLTAGLEFYPLGGDPKVLAGYMVKNKGFLPSGPSEIPIQRNQIKEIIYSLLPACKDPDIDSGIPFKADAIIANPPAYGHTHVAEALKIPLHIFFTMPWTPTSEFPHPLSRVKQPAGYRLSYQIVDSFIWLGIRDMINDVRKKKLKLRPVTYLSGSQGSDSDVPYGYIWSPHLVPKPKDWGPKVDVVGFCFLDLASSYEPPESLVKWLEAGPKPIYIGFGSLPVQEPEKMTQIIVEALEKTEQRGIINKGWGGLGNLAEPKDSIYLLDNCPHDWLFLRCKAVVHHGGAGTTAAGLKAACPTTIVPFFGDQPFWGERVHARGVGPQPIPIDEFSLPKLVDAINYMLDPKVKDRAVELAKAMENEDGVTGAVKAFLKHLPRKKSEPEPSPDPSSFFSFRRCFGCS

SEQ ID NO: 7724 - protein, 1452 aa, Corynespora cassiicola
MASEDRGRHRPSRKLTKKRRESRRVSLDIPERFKDGDDAQDDVTAPRRNNTMSMNQSMFSMIARAGQQSQTDLGAMREVDSGDSDDEAKQPVQYHSLDGAARLSRLSSAHDFRAHQDEDGDKKISHGKHRRILSDNKLLRSLPKLKIAGRKDATSDSRPTDLMSSSQFLPPKSPPDGPSATLSNDQSSANRSTVTPGEEIHVERRKTSDRKVKHGSTAALSKGKGPISLAKRLQQIFEFDDVEEVISEYPCWLLQSILLQGYMYITQKHVCFYAYIPKKHHDVGRTGYLYKRGRSKYNRYWFILRGDVLSYYTNPAELYFPRNRLNLQYAISAEVLDVKDKAKDETTFIITTDERKYQFKADSAASAKEWVRSVQKVIFRTHNEGNSVKISLPIQNVLEIEESTILDFADTVKVRVIDNDETYAIDEYFFSFFSNGQDALNVLRIMINDNDHHQASHSGEQPTSSTPTAPGASRSQPTAALDGPIDSRHIMENVRATLSPLPAPHVGRPSISADSGRSSGDANRRSFDARRSTDVSRSFRQPSHEIRRSFSESRTDKQSRHLPGDRSPLSARPHDSSESATNSFDPGTESSAAVQSIDESNASASQILSRSDVFRAPDIHHPDVTASDKSDSLARHSQDTTRSSGGGKTYPRSPRTFPIVGGKPGHRATFTSPDVEDDTDAQQTAARLSGSSSALQDIASYPLQKASGFAGFLRTRSKKMGNLLATESMGYYEKVSGMLAGGRKHYNTAEGLEPDDQVHGFEEDEDAAKAAENFREHFAFPESEQLQSSFFASLQRVLPNYGKIYISGRYFCFRSLMPTSKTKIILPMRDIENVNKEKGFRIGYHGLAIVIRGHEELFFEFSKAEYRDECAVIILRILESTKYIEDEQSSSSGVDSDDEAAKAEHDLLQEARQGNETGAPIDVSQIVRAADHDRIPLIFDDPLASIVDFKPSEPLTIVCLTIGSRGDVQPYIALCKELLKEGHKPRIATHAEFESWVREHGIDFAPVDGNPAELMRICIEHGMFTYGFMKEANAKFRGWLDDVCSSSWKACQGADVLIESPSAMAGIHIAEALEIPYFRAFTMPWTRTRAYPHAFSAMEKKMGGSYNSLSYIAFDTVFWTAISGQVNRWRRRELGLQNTTLGRMQANARPFLYNFSPTVVPPPLDWPDWIRVTGYWFLDDPTFEPPADLWNFITTARKEGKKLVYVGFGSIVIDNPAALTKTVVDSVLKADVRCVLSKGWSDRLETKDASKPEVPLPPEIFQIKSAPHDWLFKQMDAVVHHGGSGTTGASLRAGVPTIIKPFFGDQYFFAHRVEDLGVGIWLKKINTSVFSRAMWEATNSQRMIVKAKVLGQKIRRESGTQVAIQTIYRELDRARTLIKKHAKQDDDNTDEFDEEWTFVEDDENVNTSHQFEAHQAMVLGRDGAPTGGSPLVLGSVALKGSSARNSESAYRS

SEQ ID NO: 7725 - protein, 1697 aa, Dictyostelium discoideum
MDEFTSDSLTTSRLLRQISHSDSLSSVGSSSNRSNSNYENKINNGIINDFDSTNANDGISNNSNNSNNNNNSSSILKIHQSPQSILSTEQQHQIQQYQQYHQQQIYESGYVPPHVYIFDPDYKSNNDEEDKEKRSLIELNKSTDLSNIKTTTTTTTTTTPPPLMIPENEEENKQLRQEILNELSKSESFTKIKEPGEIYGFCECSLLYNHLTCANLVITSNYLIFLPQQQVDSDYVLENYLYKKGDFFWKKYWFVLTPDSISWYKSSILKETHYPNGTILLSKIVTVDKLDPEETGKPFCLQIMTNTSIHLIQLDTEPQLEHWYHEINRMQKNLNVTIPIGDIVSITMESNAALFFDSLCLTLKKGENCLVTPSSSSNEVYSLLIKLWNRNRGVTVVEPEKQQRLLEFQKTFKLSQGVNLLIETPCVFYQDEEFSYEGVLYATTEGTLYFSSLDSVLIIPESDIYAITIDRKSDNRDALKVYTTDYDVLFFDSIDDIETFFNVISTSLARSNPKIFFSTVGQIPPIDEPKHDEKEHKSTYQTISSGIRSWKIPIPSLPNFSIPIPKSIPIPLFRSKSSSHLDPQNSQQQQQQQQQSSSLQLDDNNNNIVIPHTSNPTTIIPSTSSSSAIPPPPSSTSSTSSTTHEKTIIIQKNSSINSTFHDIFPLLPLDETVIMFQNCSLYYYSYDSNVEGIVYITKSYIAFNPSPLDKQQQQQQQQQQQQPNSSSITSTTYDRDLDTDSDTDSESDFDYPKQSQHDNSVVMVNNNQYKVKEVLMKKALIPIEDIVSVTKERFLLFFNQCVKIITLDHKWIFGSLNNINSFYNLILETWKQIPKTLLDSSSSSSSSSSSSLLSSSPNNNNSDLNINGNSEGSIFTPLESIKIKNKLGLPADEVLITWFNCTNFKGAQLKYGFLYISNNNICFRSKFGFQKRTIVIPLSQVIEIKKYSAFIPNGIKITTASHHEFQFASFIHRNRVYQILYETWLKANNKKSNSSNSLSSSPTITSPLAISPSIASPSITPPSSTPPSSTTPSSTTPTITSPTIHSTLPSTVVYNDIQEIIDGENNSNNNNNNNNTNNTNKSNSFIGNVEEDVDKIKRSIKSLPILKIHSAQQQQQQQPKTTTTTTSTTTTNLISPRLLTPLTITQSPGFSSLVNSPILPVKPLRITILTIGSRGDIQPFIALSLGLKEYGHNVTLATHELYRDLISKEFGLNYQPLGGDPRELMDLCVRNGIFTPKFIKEALSRFRSFIDDLLLTCWKAVQNSNTQVLIATPGCFAGPHIGEVLQIPFFNAFTMPFTRTRTYPNPFAPFASHQMGGVFNLATHVMMEKVLWQPISGQINQWRTETLKIPPWNSSVSINETYRMPYLYCFSKYLVPKPPDWSGEIAITGYWTLKNQANSDSPPDDLIQFLNEESSTENDDIPIYIGFGSIVIDNPTALSLLLIEAIKLSGKRAIISQGWGGLSIDEHNNNNNNNNNNNNGENSDSNKSSLQSNRIYLLKKPVDHSWLFEKVSLVISHGGAGTVAASLLAAKPTIVVPFFGDQFFWGERIKQTGIGTSIPFDILTAKSLSSHIISILNEPSVRAKVNKMSHLLKREDGVKTAIDFIHRYLPFSFIPPREIPFSSAPNSCMGCKQPFTLLHVMKARVHCHCCGKIFCESCTSHKCPIKKYRINTPVRVCDKCFNDLQSNPSSNSFILND

SEQ ID NO: 7726 - protein, 1298 aa, Histoplasma capsulatum
MPPDDESRTAGSSSSSKPHLASTYRLPQSHIPDRLRMGDDEHEDMTAPPAGTAGRGGRAPYMHQSVFSMIAAASSKNDFHNRFDESSDAEDEDADAARLSKDRFLSNDGVDGRRDGSASTSHLLNIAKRDKSSVPNAVEDRGRPHHRKRLSENKFLKSLAKLPHRGNKGKVPAPEPEPELDPTVTSEPSSTKAVRLVAATEAPVLSRMLDAQSRFGESEPLLNPTELPGKPCCQRKELSPSSLLSARLMDIFGFDRPEKVISEYQCWLLQSVLLQGYMYITEKHISFYAYLPKKPHTIIKSGYLSKRGRQNPKYNRYWVALKEDVLSYYMDPSNLYFPSGHVDLRYGISANLAEQKDKDKDTDNNVKDFTITTNNRIYQFRADSATSAREWVKTLQKVIFRSHNDGDSVKISLPIENVIDIEENPVIDFAHTFKIRVVESGESYAIDEYFFSFFECGKEAIEVLKKMANHTPAQHIQQAMLAPDGGHISGCRRSHSVDVISHSSTHETTLLAEAVKATLRPLSPLDSQYGSPKQSQDLPRSHFRTFSRGRRLHSRECSEAGLEQKRSDSTNRASVGDNQDERSAGGKLQNSSDSFVQSLEHATESSAILQSTSGTVESASQILNRSDVFRSPTIHRLQNSLSGSGEAPRRHSEDTARFPPTSADLLPLRTQTTQSLMKQAQQDAGSDSEHDFQLRSVAPSASSPTLQELMKAGSYPLQRAAGFAGYLRNRSKHMSNLLATESMGYFEKVSGMWIGGKRHYGDGETILSEDKMVDPEDEEQGCEHGDRFRTHFALPPSEKLQATYFAYLHRVIPLYEARLEGMDAQQSSPTLSASVLLSSTSSPILFDDPRVSIVQLQAAGGIEDYMSYYRLPSDILIESPSAMAGIHIAEALGIPYFRAFTMPWTRTRAYPHAFAVPEHKMGGAYNYITYVMFDNVFWKAIAGQVNRWRKRELGLRSTNLDKMQPNKVPFLYNFSPSVVPPPLDFCDWIRVTGYWFLDEGANWQPPVELENFIKQARADEKKIVYIGFGSIVVSDPAALTKTVVDSVLRADVRCILSKGWSDRLGDPSSAKAEIPLPPEIHQIKSAPHDWLFSQIDAAAHHGGAGTTGASLRAGIPTIIKPFFGDQFFFGSRVEDLGVGICMKRLNVSVFSRALWEATHSERIIVKAKTLGEQIRKEDGVATAIQAIYRDLEYAKTLVRQRSPTTSAPQTAIYAVSNEESAAMISSETGPDDDGDGEDDADADAAMEDSWTFVGDETETDVTKKTRARERDYDIGLDNVATAGVINGSGGCGSDSGKG

SEQ ID NO: 7727 - protein, 864 aa, Rhizoctonia solani
MILVDDKTGSTEVQAQTELLSQPSSQNNTSEPTDSSLILNIPISYSHESLQEATAQPPPTYSPSVVSREQRTRMFVTNGRPVSTTDLLDSSESTADVVYPREKAHLPEYSEMITTEATVQSDGRIQVLFAPSQGFPEGYAPPVYEPALDEDGFLSAPVMCINIMIVGSRGDVQPYIALGQRLQEYGHTVRVSTHEVFRPLVKHAGLMFFNIGGDPSELTGYMVRNPGLVPNLDSLKGGDIGKSQARISEILDGCLLSCYEDDEGSEEEPGFAADLIISNPPTFAHIHCAEALGIPLHLSYTMPWSPTASFPHPLVNIKQKDETEPGMASYYSYSLVDMMTWQGLGRTINKFRTKRLGLEYLSTRSAVGIIERTSVPWTYCISPTIVPKPADWMTNIDVSGFCFLNMAKGYDPPRELVEFIEAGEPPVYIGFGSIVLENPENMTKSVLGAISQAGVRAIIAPGLGGLDESMIKTAGDEVFSLATDVPHDWLFERVSAVVHHGGAGTTAIGLKCGRPTIVVPFFGDQPWWAVQVARRGAGPPPIHPNKLTAEALAVAIRVAVSPESREAARKIGETIRSEEGPRNAVESIHKHLPLLNMRCDLDSNRVAVWYSPTHKLKLSAFAAQVLAEAGKIDINKLELHRSREYDTHIGPLDPVSGTLFPGLKIVNDFGRGIAQLPSEPGKGATKMLSASTLGLQNTLQGAAEGMHNLPKVYGGEVRKHKKVTGIGSGFAQGGKEFALGLYDGFSDFFMEPVRGFKRGGVLGAIGGVGIGALNLTTKPTAGFMHAVSMPIEGTIKEVKSMLHRQVGKNRVVTRYAQGVSAARNASEAERERVVRAFLERVSGVDSASTKDKKGKGKAKMVWKN

SEQ ID NO: 7728 - protein, 1127 aa, Phlebiopsis gigantea
MGTVKIQRRARLAEKLREVFDVPGIEEVVAEMPCWLLRSILLQGYMYLTDSHLCFFAHMPLREDQVLKSGWMNKRAARTKRWIRHWFILKNDVLSWYQSSSDPYFPHGVVDLRYAISCESSGERDIRIRTNQKTIKLSANSVPSRDEWVKAIRKVMFKAQNMGDSVKIAIPYSAIVDVEKSSAMDFSETIEIKAIDKNEHYSVDSYFFAYFHDLPVALEQIRDAVRTYRSVPGSSSPPPVIDTTASRTPVAPYQPMQSPGIGISPTTLPTPKSSSGSSFRFTSLLRPFQDSLPLMRAYSSQEPPGNEEYTHISKSPSSFVPITTSPVPLQPPSLPGTRSPSLTPTSSNVEHGHTYPPSSSSSYHSELTISSTRESTWTVGMPAWLKMPSRRLLSSPFTTLRPAIEHSTSTPPSSSAAVSEVLSSRHLSMSASGGGGDFGFFSILEMPESTVDEETTEKFRTSFAFDEKEKLLGCFPGYIFRLLPVYGKLYISSNYFSFRSSGPLTSRTTVSIASDAAMILPIRDVLSTQHAKAFRFGHFGLVVIVRGHEELFFEFSDELRRAAFARLLAQRIEDVRHRVAAGEPQPPSAGERDALILEEFGPQVPTLTETEYIREPEAMDSSLPAVMFKSTSSTFLTFKPKQPLHFTFLTIGSRGDVQPYIALAKGLMADGHRTRIATHGEFKEWIEAHGIEFGYVGGDPAELMRICVENGTFTVAFLKEGVQKFRGWIDDLLKTSWEACQGTDVLVESPSAMGGIHIAEALRIPYFRAFTMTWSRTRAYPHAFAVPERRMGGNYNYMTYVLFDQVFWRGTAGQINRWRRHTLGLPSTSLDKMEPHKVPFLYNFSPTIVPPPLDWPEWIRVTGYWFLDDANVSKDKWTPPPDLLEFMDNARKENKKVVYIGFGSIVVSDPKAVTRCVVDAIVQSGVYAILSKGWSDRLVKNAANAQDTAEPLPKEIYPISSIPHDWLFKRIDAACHHGGAGTTGASLRAGIPTIIKPFFGDQFFWADRVEALGIGSAVRKLTVQALTGALIAATTDQKQIQRAKEIGEHIRSENGVATAIEAIYRDLDYARSLIKGAPHTDEEAERATLRDQRSPSPARQSRKSPRSSTSSAHGGTSDWSVISDQED

SEQ ID NO: 7729 - protein, 780 aa, Rhizoctonia solani
MIVNDRIDNYSKFSQGQSTAPNTIYRSSDSGSLSQSYEAVACAAPPPIYSRHRRSDEFALTQGDTSSEAEFAQDLSEKSSKSLRSLSLDAEASFQDDGRLQISFGHRLSKRLPHNYAEPVNEIGLDEVGFRDAPPMNVNIMIVGSRGDVQPYLALGQKLQQYGHTVRISTHETFRDLVKGSGLRFFNIGGDPHELMSYMVRNPGLIPGFESVWNGDIGKKQAMVAEMLDKCCLSCYEADEGSPGESGFVADAIISNPPTFAHIHCAEALGIPLLLSFTMPWCATAAFSHPLVNIKQSGSHEPKAVNYYSYTLVDMLTWQGLGHAINKFRKKKLGLEYLSTASAVTMIERCAIPWTYCISPALVPKPQDWLDHIDVAGFYFLNLANNYVPPADLVEFLASGEPPIYVGFGSIVLKDPQQMTEAVLGGIAQAGVRAIVSPGWGGLDEAMIKEAGPHIFALGNVPHDWLFQHVAAVCHHGGAGTTAIGLKCGKPTIIVPFFGDQPWWAAQLAQRGAGPPPLDSKNLTSESFAIAIRAALSADTIAAAHDISDIINREDGTKNGVESFHKHLPLLNMRCDLDPKRIAVWYSPTYKLRLSAFSAQVLADRGELDIKKLKLNRSREYRTHALPSDPISGTALPLLRVINNFTHGLVKVGSSRPDKGVLKMATATAGGEYTTTVDKAIKLFISFNVIGLQTVLQGMTEGLTNVPKLYGSEVRESKKVTGFASGVVEGSKGLAYGFYDGITGLVVDPVKGFKEKGALGAAAGIGSGGSYSIVKIDRLY

SEQ ID NO: 7730 - protein, 596 aa, Aspergillus niger
MASNRNAEVFELPGDLVMPPTTASNNHPGVFELPGEAVTIPPTPIAADRKSGINITSDGRIDIDYNTTLVRRFSKLYTSHYSPRPTTPPPEYSETALQAANDNGPSLESPPAYTEKTWKIKLNIVIQVVGSRGDVQPFIALGNELQRYGHRVRLATHNVFEAFVRSSGLEFYPIGGDPEELMAYMVKNPGLIPNMRNLQAGEIGRKRAMIREMLDGCWKSCIEPDMATQLPFVADAIIANPPSFAHIHCAQALSIPVHLMFTMPWTNTKAFPHPLANLTGGGDEDQGFRNFVSYSVVNWLTWQGMGDVINHWRKELGLDEIAMFEGPRLAEILKIPFTYCWSPALVPKPTDWPSYIDVCGFFFRESPRYDPPADLLAFIAAGPPPIYVGFGSIVLEDAESTTTIILNAIRAAGVRAIISKGWSNLGGIHDDSNIYFIGDCPHEWLFDRVAAVVHHGGAGTTACGLRKSKPTFIVPFFGDQPFWGDMVAAAGAGPTPIPYKELTVDKLASGIQYCLSEQARMSAVAIAAKMQSEIGVKAAVASFHRNLPLECLQCDLEPNLPAVWSFSQNRRKLKLSKIAAEVLISHGLIDAKHLTM

SEQ ID NO: 7731 - protein, 1382 aa, Cordyceps militaris
MTILDDKQVMARRQAQARADAQARQQSADSLGGPPSTSEESLITDGFVIPSLDVPSEAPPAYGDQVDKVTFSQPGFQAGAAVAGDGRVNINISTKSRRLAELLAPVVDRQVSVAEAQEPLPPAYIPPSLGGLPGQTPPPALNIVIQIVGSRGDVQPFVALGKTLRDTYGHRVRIATHATFQKFVEDNELEFFNIGGDPAELMAFMVKNPGLMPGFDALKSGEVSKRRRGIEEILMGCWRSCIEAGNGLGPPPKPHTRYAPVNFSAHEVPGNPADRPFVADAIIANPPSFAHVHIAEKMGIPLHMMFTMPWTPTRAFQHPLANIQSSNLDDTLTNNLTYTLVEIMTWQGLGDVINRFREKALELPELSPLWAPGLLTRLRISYTYCWSPALIPKPNDWGNNIDVSGFYFLDLASSYTPDPELDAFLNAGPPPVYIGFGSIVVDDPNAMTRMIFDAIHLAGVRALVSKGWGGLGADDVGLPEGVYMLGNVPHDWLFERVSAVVHHGGAGTTAAGIKAGKPTFVVPFFGDQPFWGSMIARAEAGPEPIPYKDLTAEKLATAIEKCIEPGTIEQAEVLGQRIREEKGTDEGGYSFHKHLEVDKLRCSVAPSHAAAWRPTDPVTAGAAAIMLSLGTIGMAIADMPRDLWKSHRKYKKESDSASRPTESSSHLTPSLSNYSTDSGHATWYWSPDTNKAGGPPEVASPKQASLHEEHMSPGMAFGVESAVGTARGVNRIIEAGVKSPMNFCLGLAKGFRNMPRLYNDDLVRPVEKVTDLSSGIKVAGKELGYGFFDGISGLVRQPLHGAEKEGAVGLVKGFGKGIGGLILKPAAGIFGLPGYAMQGVHAEFGKHMSRSVYNYIISSRIKQGEQALMKASEGECEDILRRWNTVKFDLSSFYDLKRRMGGTEGPFPPPPPLPTDDSSDTVSIMDKGFSKPRTGWLQTRHLSSAQRKRMQDEKQTWKRGYVESLVPAAPTFLPEKEKAVQATNMSQEEDEVERAIRASVRETSQGVQEDDAEIEAAIRESLRVMRQSGALPATGWIDEKNGRNNDPSIFEDEEFKITDEEFQDLIQGAMRQSLVEEYGYPAGELGFPGPSSSSFTGTSRPALTEEPAPMDDLYGGAEAPGYQREAPTHASSMSQQHAVDEEELELQRAIAASKQELQRAETERNEEDIVLEYIKKQSLAEEEFRKRSKGKGVSTNYDDDDDDDEDMRLAMEESLKVSHGGLGQDLPTERMCRQDWIITYWLCKCTKTSFLQLIADDGCGFCGTPSGAERLVNATTERVPCESSQASPHKGHILGERKSNMCRQDWTYIYWMCNDIKDKSFVLTPERGCGGCGEVTADSFFPANRILPSPCPECVESQKWISMDGIWMPRDLAESRGWKPPP

SEQ ID NO: 7732 - protein, 1250 aa, Kazachstania africana
MANSDSSSQPQKSQEGKTTKSKEASVLLSKPVKILSSTKAATPAISKPIQVTGQGISSSISALKRVKNEGIEYTNALGSIVISPVAKFNHENVQNEEDDLAKSKYMMKSIAGLLTTASVYAGMNIAQSAEDLAEEDKIVKSSETLDLPNAPLEQRKPTLFELSVVPKINNRDVAQRDADDNGIEYEESTKENIKWKLQRKFNLDQDEEFQYGSSAWLLKDVLIQGHVFVTSKHLLFFAYLPKTSGEVKMTGHLNVKAKLKGSNRYWCILKGDIFSLYSSPTEIYFPILTIDLRNVTLIEIQKNSNNTELASNFKLVTEEKTFRFNADSPYSAKTWCNALRRQRFTAENSENNSLSLKIPISNVMEIDDQKMTNESSILRVRALESRETFAVDDYIFMFLDTAGDQLKGKLEGQISELKLNGTKTIYNSDPTAIVNKQQDKLIQANKNSDDNATKNYRKHSSSSPIRYLPLVRKITSKKLLDEPPSAKAEQKSKIQRFRSKSNQLLRRSHNTDDTRIEESIIIESYSTPSALEIQQSPSDTPIPGSYSPSSDDHSTRREKLTEWTSKPFKNVAGMWSAKPTHYDNSWVKFPESKHLFVVKGKELVNANKRFRFHFNLKKEEVLLSSYYAHLNRNVPIYGKLYLGDDVLCFRSLLPGTTTKMVLPLTDIETCYKEKGFRFGYYVLVLVINAYEELFFEFSNEATRNDAESILLERVEKLKVVKIDSATVAENYIETDSENAKLKFFEDKIAAQGFEVPLLVDQNPNFKTTIVPNKSYSFGLLTIGSRGDVQPYIALGQGLIKEGHQVTIITHREFKDFVENHGIKFKELAGDPAELMALMVEHESMNIGMLRDASSRFKGWIKRLLQTSWEACKTSNFDILIESPSAMVGVHIAEALQIPYFRAFTMPWTRTRAYPHAFIVPDQKRGGNYNYLTHVLFENVFWKGISGYINQWRVETLGLNKTNLYLLQQNKVPFLYNISPTIFPPSIDFSEWVKVTGYWFVDEKETYAPTKELESFIKKARNEGKKLIYIGFGSIVVSNAKEMTKALVEAVVEADVYCILNKGWSERLGDKSAKEVEIELPDCVFNAGAVPHDWLFPQLDAAVHHGGSGTTGATLRAGLPTVIKPFFGDQFFYSNRIEDIGVGAALRKLNSKSLANVIKKVLTDERIIEKAKIIQKQIAKENGVRTAINCIYSELEYARSLIASKKANRRMSLPFNFETVTSVAETGVNSATNVVTNMIPSFNVDDSWILL

SEQ ID NO: 7733 - protein, 1390 aa, Exophiala oligosperma
MASLEGASKWRDTSKRTDSHKAQKRSPRFTRLSSPGMPSRLSLGADAHDDVTAPSRGRNAPAQYMNQSIFSMIAAAGSRTDFNARFDESSDSEEEAAQTKSSFVDSKGTSVNERHVARAAVTKDDALSSTKSSTYSSLVHPSENLPPSASASRLKDKAPAIRQDFGPGSDSASDSGKSNPRDAPLLSKLLTAEAEFTESGGHPPSMPLIDAVPEAVLATRLMEIFGFDEPEKVLAEYPCWLLQSVLLQGYLYITTNHICFYAYLQRKSHQVSKTGYLAKKGRTNSKYKRYWFSLKGDVLSYYSNPSNLYFPSGNIDLRYGISAHVSSDKGKQKECKDFCLTTDHRTYHFRADSASSAKEWVQTLQKTIFRSHNDGDSVKISLPVQNIIDFEESPVVEFAETIKFRVLESEDSYAVGAVDEYFFSFFSFGQDALQNFRTLLPEADGARTSDDGLLSAARKDMSTFSPQDKADVHDLPRRGGPPAQSPPALKESVRATLLPHPLPESRNISPRVSGEFSHGDSPSRSSGEYGRGSFKRGRRSGSTSRLETNIPRRPHSPFAQHHDSEDSYVHSIDKETDSSTAPLSPRAEAQMSASQILDRSDLFHPPVVHRMTTLASMSSEGHSEGGTVLSTSHPNDATSPVPMRGAGTYGKNKQSGSKEEGIVKTDSPTLQEFVRAGSYRLPRAGQLAGFLKNPSKSVLKYLPTEPMSYIEKVSDMWSGDRKHYGDNEGVVPGDKGIDPEDEETNVGHGDRFRAHFALPSTEKLRATYFAFLHRVLPLYGKIYISNRKFCFRSLLPGTRTKLVLPLRDIENAAKEKGFRFGYHGLVLVIRGHEELFFEFSSSDHRDDCTVTLLHSLESVRDMAESGMLAKEEEDDAEAAKEEHRMLQEARRSSTGDHQLVLPDTAEAIYSHEDTRPILFEGPRASISSIKPTTPLKITCLTIGSRGDVQPYIALCKALLAEGHKPRIATHAEFGPWVLKHGIDFAPVEGDPAELMRICVENGMFTYSFLREASAKFRSWIDELLSSAWQACQDSDLLIESPSAMAGIHIAEALKIPYFRAFTMPWTRTRAYPHAFAVPEHKIGGAYNYYSYVMFDNVFWKAISGQVNRWRKKELGLRSTNMDKMQPNKVPFLYNFSPHVVVPPLDYPDWVRVTGYWFLDEAQDWTPPAELQKFIEKARKDGKKLVYIGFGSIVVSDPAALTKTVVESVLKADVRCILSKGWSDRLGDPTAVKTEVPLPADILQIKSAPHDWLFRQIDAAVHHGGAGTTGASLRAGVPTVIKPFFGDQFFFGSRVEDLGVGICMKKVNVSLFSRALWEATHSERMIVKARLLGEQIRKVSFKSSRVYSEMRNELTFPPGERSADRYPSHLPGFGICQIHRGGKSKQTRSSC

SEQ ID NO: 7734 - protein, 1439 aa, Scleroderma citrinum
MSRLVPRKARSPIASPVHQDVPLPDGTEQGQDASPQERIRRLATKTIDLGKCITGRPHPPPPASKGSRRIPNTNKKGKGKETSREDPTEAFSHSTPLSQPQSREHTSIHQVSSPASSDDSPFIRPPSPPSYPPHRPSLQEIQGVGSMRVGTQTLIQALQALPWGDDPDNEDDPGSATTPNIDSDDDTTPHIASSIHAIYHSVEWARRAMSSLSIRSTKRLVQGDLQGESDSDAEMNLAFEDDVEVDDFETATPRPADIQKPEPLPSAPLHMTVHLAASIRRRSVSRSGSMATVKVNRRALLAEKLREIFDIDALTEVWAEMPCWLFRSVLLQGYMYLTNSHLCFFAHMPSREGQVLKSGSLSKKATRTKRWIKYWFVLKNDALSWYQSSSDPYFLSGIVDLRYVLSCESVGERDIILRTTQKTVTLSADSVPSREEWLKAICKVIFKAQNMGDTVKIAIPYRVIVDVEKSSAFDFSETIEVKIVDKDEKDSYFFAYFHDIQAALEHIRDAVRLHRALDPGSPQVVLDTTAARPTVVTAHGIDRARSLPTAESKGSYSFRLSHLLRPFHDPFPLPLGRAYSAPDPPNAAEEYEHISKRGSFVPVATSAPGNDLTSPITNNPVFPADSSLPLRDHTYPPSSSPGESSSSSQGKILPLGVPWNVGVPSWLRSARRTTAPGGSVSLTVSVSQNLGSVHEIYSSPVTSFPDQSNGAPADLGYSVLETTEAMVDGEIMEKFRTAFAFDDKEVLLAYFSGYLYRLLPVSGRLYVSSNYFCFKSTGPLSQKTRMILPLRDILNVEKSKATGFGHVGLIVVIKGHEELFFEFGTDDRRSAFISILERQLEDTRKRPCNVVVPKLSEGQRHALILEEFDPRLSSSDADPVPAPENMSESLPAVMFTSASSTFLTFKPKESLHFTFLTIGSRGDVQPYISLAKGLIADGHRCKIATHGEFQAWIESYGIEYGYVGGDPAELMRICVENGTFTVSFLKEGLLKFRGWLDDLLKTCWEACQGTDVLVESPSAMGGYHIAEALRIPYFRAFTMTWTRTRAYPHSFAVPEHKMGGGYNYMSYVMFDQVFWRAISGQINRWRRNVLHLDNTSLDRMEPHKIPFLYNFSPTVVPPPLDWPEWIRITGYWFLDDAEVGAKKWTPPDDLISFIDSAHQAGKKVVYIGFGSIVVPDPEGMTRCVIDAVTQSGVYAILSKGWSDRLHAKSSEASKPEEPLPKQIYPITSIPHDWLFQRIDAACHHGGAGTTGASLRAGIPTIIKPFFGDQFFWADRVEALGIGAGVRKLTVESLKDALVSATTDQKQIDRARLIGKQIRSEKGVEVAIEAIYRDLEYARSLIKRPPSAVEEVEQGPTVSEDPVPRPRYDSAGSHPGSEDWSVISDLERRSSFGSRRSDGKIDPSSLHKRNSLTAAMMSVLPDSFTSQNHRRCSSASCRRA

SEQ ID NO: 7735 - protein, 824 aa, Talaromyces stipitatus
MTHSSKFMLALGRGGLDSMRGGGKKKEDQSSAEPSFQSDPSNPGAWDDDLDPPPDIDWDEPPVYELVGSGNRASTTVVAQGNLLSAKRLSISAPAQPKPYTIPNIINSKSPRLNIVIQIVGSRGDVQPFLALGRELQIEGHRVRIATHDVFRDFVTEAGFEFFPIGGDPSSLMAYMVKNPGIVPKFETIMSGEISRKRRMVYRMLEGCWRSCIEPDPENNIPFVAEAIIANPPSFAHVHCAQAMGIPVHLMFTMPWSPTRAFPHPLANIERTDADPMTTNYLSYGLVELLTWQGLSSVINGWRRKSLGLDPVPTLTGPSIAEALQIPFTYCWSPAFVAKPQDWGNYIDVCGFFFREEPAYTPEDELRDFLSSGPPPVYIGFGSIVMDDAEKMTAILLGAVRTCGVRAIISRGWSKLGSSQQDPNVMFLGDCPHEWLFKHVSCVVHHGGAGTTACGLLNGRPTTIVPFFGDQAFWGQMIAAAQAGPSPIHYKSLNENNLAEAIRYCLMPKARNAAATISRKMKADNGVRAASRSFHCNLPVEALRCDLLPDEPAVWLYTKKKKTLKLSDKAAFILTENNKIEAKHFKLYQPKPIIIENQRWDPVSAGSSVLLGMLFDFTVGFSQVFTGPAKVFQSKEEGGGKKEAAVTFGKGFGKMAGVLPKATLVDFPLAITEGLHHLPRLYGDEVRNHGQVKDWKSGCGVAGKTFGYGFVDGLFGTVTKPYEGAREGGWAGFGKGLGKGAMGLVTGPGAGMFGLFAYPFLGMYKSISTSSLSPSQRKILLARQVYGSYMARQREYAAQDGGQEWDEATQNIVLEAFERRVKRG

SEQ ID NO: 7736 - protein, 1428 aa, Coprinopsis marcescibilis
MAHKPSLQPLLHDPMAAPTLDTSVDALGMGEAPETEEPKLTQSRVKRLSSAVEKTVDKLSRSVGSKSTPSSPPPATGHRRVFSLTRKPQNLAAEGESPSISPARSDIPRPQSGLAASKPSSMPPTATDDSPFITPPSPPLRPTTLEQFRGDGSMRAGTQTLIQALQALPWMMNDADDETGANDVGQSDADSDDERPGFKRLSSSIHAIYRPLARSRRLSIPIKGKGKGRSSSPVIEETTPDDLSSSEEEEREPDFEEEEGKLQHTRPQVVQHQSLPALTIDDRSLFRPRPDRAGSLSTVRLHRRTRLAEKLREIFELDGIQEVWAEMPCFLLRSVLLQGYMYLTNNYLCFFAHMPTREDQILKSGSLSKKAQRTKRWIKHWFILKNDALSWYQSSSDPYFPHGILDLRYAIACEAVREREFKIKTNQKTIVLSADSVPSRDEWVKSVKKVIFKAQNSGDSVKIAIPYSVVLDVERSSAMAFNETIEVKVVDKDDQYSVDSYFFAYFHDLPAALDQIRDAIRTHRVLPEHQAEQTVLDTTVPRSPQNPPNDRPSASVSDSFVPKSVSGFRLSSILRPFSDTIPFTRATSVPAPESQGSDDFTYITQRGTSSFIPFVNSPRATIRRPPLSETQSQPSDSQSVPTPDHTESNSLWNMGVPAWLKPSRRVFGSSVSTQTDASASSDSMVVKELYSSPSPSTLASVGRLAAVGPGDMAFSILETPAIPVDHDIAEKFRSAFAFDEKEVLLGYFPGYIFRLLPVYGRLFVSTHFFCFKSSGPLAARTRMTLPIRDILALEKSKATRFGHHGLIIIVKGHEELFFEFGAVDKRDAFVRLLEKQMDDVRVRLAVGEAMEPTTGKKAALALEEFESRTSSSSGDSDPAPPPDNLADSLPAVMFTSASSTFLTFKPNKPMHFTFLTIGSRGDVQPYIALAKGLMADGHKCRIATHGEFREWIESYGIEYGFVGGDPAELMRLCVENGMFTVSFLKETLHKFREWLDDLLQTSWEACQGTDVLIESPSAMGGYHIAEALKIPYYRAFTMTWSRTRAYPHAFAVPERKMGGSYNYMSYVMFDQVFWRATAGQINRWRRNSLHLGPTSIDRMEQHKIPFLYNFSPSVVPPPLDWPEWIRITGYWFLDDADVGSKKWTPSPSLVEFIDNAHNQGKKVVYIGFGSIVVSDPRTMTKCVIDAVLKSGVYAILSKGWSDRLHVKLADASEPEEPLPPQIYPISSVPHDWLFKRIDAACHHGGAGTTGASLRAGVPTVIHPFFGDQFFWADRVEALGVGTGVRKLTVKGLTEAFVAATTDQKQIARAKLVGEQIRKENGVAVAIESIYRDMEYARSLIKRQPLEEDIDEDFEQSTIRYQGLSSPFTPGSFSGFSSGGSAHGSPSEEWSVIDEDERRSSVGSQLSDSRIRRDKPGSPPPARSPISSP

SEQ ID NO: 7737 - protein, 580 aa, Oryza sativa
MRGASGGGEGFVGASSVSNNISLPNEGTSPRGTDNAECSETSSDRSNSESIKPEECAMPSSIFDKKISIKKKLRLLSRMAILKDDGTVEVDIPTNAEAASLDLSSNDYCNEAFSGEPLASSDFQHRPPMQIVMLIVGTRGDVQPFIAIGKRLQIYGHRVRLATHANFKDFVVTAGLEFYPLGGDPKLLAGYMVKNKGFLPATPSEIPIQRKEIKEIIFSLLPACKDPDTDTGAPFNVNAIIANPAAYGHVHVAEALKVPIHIIFTMPWTPTCEFPHPFSRVKQPAGYRLSYQIVDSFVWLGIRDIINDLRKRKLKLRPVTYLSSAHAYSNDIPHAYIWSPYLVPKPKDWGPKIDVVGFCFLDLASNYKPPEPLLKWLESGEKPIYIGFGSLPIPEPDKLTRIIVEALEITGQRGIINKGWGGLGNLEEPKEFVYVIDNIPHDWLFLQCKAVVHHGGAGTTAASLKAACPTTIVPFFGDQFFWGNMVHARGLGAPPVPVEQLQLHLLVDAIKFMMDPKVKERAVELAKAIESEDGVDGAVKAFLKHLPQPRSLEKPQPAPPSSTFMQPFLLPVKRCFGIAT

SEQ ID NO: 7738 - protein, 436 aa, Unknown
  Description of Unknown: Agrobacterium radiobacter K84 sequence
MRIAIFTIGTEGDVRPLVALALGLQQAGHQVRIATDPSCADLVRENDIEYACLNGDFLAWMRSDQRTMERGLASFAIMAEARRRLLAMAVDWAEQGRAAAQGADLLIGNGMVYYLTASLGERLGVPVVESQLMPTLPSHTSPPLPLPQWMYRLPGFANKALGHAARLLVWKTLKPAYNEIVRPALGLPPYPRFAPFQAQFLNHPRLFGFSPTLIEPSASWPEQTRVTGPWYLESRDTWQPSEALMQFLESGPPPIYVGFGSMMHHDAAGFTDTILGAVKMTGKRAVLATGWGGLSEKADFDASTIFALERAPHDWLLPRMALAVHHGGAGTTAAAARAGIPSVVTPVFGDQPFWAARLEHLGVAPRALPREKLTAELLASAILAANAPQMRAAARKLGEELRAEQGVESAIDALRTWGLLPSSITIPQSSSRLKSA

SEQ ID NO: 7739 - protein, 1518 aa, Emmonsia crescens
MPPDDESRTAASSGRSNPHTTSTYRLSSSHIPDRLRMGDDEQEDMTAPPGATTGRGGRFQYMHQSVFSMIAAASSKNDFHNRFDESSDAEDEGADTDADRPPKNRFLSTDGVDGRRRDGSASTSNLPHVAKRDKTSIPRTAEERGRSHHRKKLSEHKFLKSLAILPRRSSRGKELASELEPEIEATVTDKLSSANAVQLVATTEAPVLSRMLDAQSRFGEYEPPPSPTEHSGEDHHERKESSPATLLSARLMDIFGFDRPEKVISEYQCWLLQSVLLQGYMYITERHISFYAYLPKKSHTIIKSGYLSKRGRQNPKYSRYWFALKGDVLSYYLDPSNLYFPSGHVDLRYGISSNLAEQKGKDKDKDVRDFTITTNTRVYQFRADSATSAREWVKTLQKVIFRSHNDGDSVKISLPIENVIDIEENPVIDFADTFKIRVVESGDSYAIDEYFFSFFECGREAIEVLKKMVSDTPAQQIQQAMLAAPDGGYTPRRRRSHSANAISPPSTRGTTLLSEAVKATLRPPSPHGSRSGSPKQSLDLPRSNFRRFGRNREGHSHESSGAGLEQRRRSDSTNRASVEDNQAEKSPRGKLQSSSDSFVQSLEHATESSAILQSTSGTAESASQILNRSDVFQSPTIHRLQDSLSRFGEAPRRHSDDTARIVPSPAEVHIHPPSRTQTTQSLMKSRPAEHQDGGSDSEHDLHHRSVAHSASSPTLQELMKAGSYPLQRAAGFAGYLKSRSKRMSNLLATESMGYFEKVSGMWIGGKRHYGEGEAILSDDRMIDPEDEEQGCEHGDRFRAHFALPPSEKLQATYFAYLHRVIPLYGKLYISNRKFCFRSLLPGTRTKMILPLRDIENVEKEKGFRFGYHGLVVIISGHEELFFEFNTADGRDDCAVTLHQNLESIRYLVESGLLAQQDREEAEAAMAEHQMLQEARLEGMDEQSSQTLSTSMPLSPTNSPILFDDPRVSIVNFKPQEALRITCLTIGSRGDVQPYIALCKGLIAEGHIPKIATHREFEPWIRKHGIDFAPVEGDPAELMRICVENGMFTYSFLKEASSKFRGWIDDLLSSAWASCQNSDILIESPSAMAGIHIAEALGIPYFRAFTMPWTRTRAYPHAFAVPDHKMGGAYNYITYVMFDNVFWKAIAGQVNRWRKRELGLRSTNLDKMQPNKVPFLYNFSPLVVPPPLDFCDWIRVTGYWFLDEGGDWQPPVELENFIKQARTDNKKIVYIGFGSIVVSDPAALTKTVVDSVLRADVRCILSKGWSDRLGDPSSAKVEIPLPPEIHQIKSAPHDWLFSHIDAAVHHGGAGTTGASLRAGIPTIIKPFFGDQFFFGSRVEDLGVGICMKRLNVSVFSRALWEATHSERIIVKAKALGEQIRKEDGVATAIQALYRDLEYAKTLVRQRSHASSASQTGIVAVPMEESGVGISELGLDDDDDGDNDGDGENDGEGDGDGDAAMEDSWTFVGDEAETDLARKTRARERDYDIRVDDMAAAAAAARAIGSNGSHGGGHRDGERR

SEQ ID NO: 7740 - protein, 427 aa, Salinispora arenicola
MRVLVVTVGSRGDVQPYVALGKGLQAAGHHVTLATCARFRTVVTDQGLAYGQLSDDILQLLDSTAGRAAMEDATGVFGSIKTNIKLARQANPINRKLLVDVWAAAQQAEPDVIVYHPKALAGPHVAEKLGVPVVLALPVPVSVPTGDFPLVGLPALPLGRWYNRLTYRLAGAGYRMYDGMVNAFRRETLGLARTSGAALTTRLPDGRPIPVLHGISEHVLPRPADWPAHVHLTGYWFLDGADRWQPPPALVDFIEAGDPPVYVGFGSMAGRDPHRLTRVVGEALRLAGVRGIITTGWGGLEMVEQSDTNWHLTQAPHDWLFPRVSAVVHHGGAGTTAAALRAGKPSVICPFILDQFVWGRQVFALGAGSAPIPQRKLTAQRLAAAIREVTTNADVQGAAARLGRSLAAEDGVANAVARIDAVLDRAG

SEQ ID NO: 7741 - protein, 1525 aa, Millerozyma farinosa
MTFYSKFMSSVVPPFSFLNSRTRSSDNIKDDINSDKKTAAGFTGSDTPGEEVDIAETVGEDPSIGNCVNLLTASQMVEGIENLKWDDERNDRIDDPKFNEATKLSQIAAQEEKNHETKRRGSLENGDKPKQGPNKIEYDLYESEEEDSSDDENSDSRAQAHEGSSTAPDTAQATGIGFNEVQGPSKLSLDKPSNRTPFQQSVLENLNPYLFNESYLMKLSGHSNTHPVTVKDFYDSKRDVICLSIAERLKLVFNLDDDDYFRGNYNVWLVREVLLQGHIYLTKKCVLFFSFLPRTFEDQTKRSFKDEYRHDDSYKLIQEGSLGKKTANYYDAVFTSVITHRFWAILRPETLSLYNSATDLYFPVLVIDLKNCVNAELMEKEYTKRNTSGIATQESEERMVFDEKNISSMLDNEGNANYSEDAVEDYNTGTWFKVLTKKKTYKFYADSLYTARQWVNNITKLIFQFHNSNANNEVLMKIPIESIDYIRKQNLLDNSLQNNSTETDPLLFALNHKAEDQQSNHNLSTSNTKQKVNNSFRNKNGGASLSSNLSVFLFFKDGDSFYDQFLNWTLFKKGSESTLQYASSEDVVSKACSSSSDHSKSFSTLNQLNTNNNIINQILNIKQMKNDSHPPSHLGQKNTPVNSSNSSLASESTHGSVIKDIGKTFTSSAKLLTRKRSYSVPALLNKLTPEKKQLPTLDSEEHIPIVISSEKLKGLDMSLVASEKVLDNLDKRYERFKKNEDPEDSIVFEKIRHPKSVTLSPDLDLDGISHSSPLYLSDPKELHVAKENKKKNKLASFGRSIWAMSCKFTAINHFEEFFVDDPYYVSDLAAKEVSARHFRQHFSFNNEENLVATYYSHLQRSVPVFGKVYIGENEVCFRSLTPGVSTKMILPLQDIEFCHNEKGLNLAYSGLVLVLKGYEEIFMEFYSQKARDDCEVIIGKLMSKCNPLKRFSKSPSNDLSNVKNKEKYISAKEMTRRKYTLALSRRKIENARLKLFEDRLNEAAGLDIPLLLEESPFYKTEIKLSTSFNFVLLTIGSRGDVQPYVALAKGLMKEGHHVTIATHSEFQTWVEGYGISFKSVAGDPTELMSLMVKHSTLSVSFFKEASSRFRRWINELLITSWEACQGADILIESPSAMGGIHIAEALGIPYMRAFTMPWTRTRAYPHAFIVPDQKKGGSYNYLTHVMFENVFWRGISGQINKWRVNDLGLPRTNLYKLAQYKVPFLYNISPTVFPPSVDFPDWVKVNGYWFLEDGNSYDAPSELLEFIKNARNNGKKIVYVGFGSIVVKNAQQLTKAIAEAVLNADVRCILNRGWSDRLKKEDESEVELPKEIYDAGTIPHEWLFPRIDAAVHHGGSGTTGATLKAGVPAIIKPFFGDQFFYASRVEDLGVGIVLRKLNEKSFTKALLTVTTDSVIMEKSKKVGEKIRSENGVADAIAGIYSMLEYARTIVISKQQANESSRSGLSSGLQTPHENESDNYLDTEHNSESEEDNSDTLGDNPSVKSLESLLITDSHPQNDDEVDLAR

SEQ ID NO: 7742 - protein, 999 aa, Cyberlindnera jadinii
METLPSRLSRYWAVLKNHTLTFYPKSTDLYFPSLTIDLRNAIKAQIIPDSKAPPDAAEKDTSWFKVITETRTYKFQADSPNNARSWVGRLKKQIFTIRNNGDCVTVKIPLQNIIDAEETPIFEPAETIRLHVLESGQSFAYDDYFFMFFKSGPEAFKAITHAADEVKQTEEGATPALLSDSTVKFDVQQKTRSFNPLKHVFRSHNGEFSAPGSPASRSLQNVAEVPNSPSMPILSRSTSSFTNEQTVAQIIPASQQDDDNIEEIPDDILSDDEPDESISDDVASASSKNHRFNPLRPVNHARNTISRWTPQFIKSASSMWNANIVHYAEKNSLERGSEDDEFLATNAETVRMTKRFQNHFSLADSDHLIATYYCYLHRNIPMYGKVYLGEKEICYRGLVPGFHTKMILPYSDIENCYKEKGFKFGYFGLVVVIQGHEELFLEFSSSSARDDCEYLLLKQLESSPSDSSSQAEQGESQLSSSKKLEASKIKFIEDKIHSEAGLHIPIIIEDHPLVTTKLKPTKSHKITLMTIGSRGDVQPYIALGLGLKAEGHEVTIATHAEFGDWIKKHGLRFVEIAGNPTELMSLMVTHGSMNVGFMREASSKFRGWITELLKTSWEACQGTELLIESPSAMAGVHIAEALGIPYMRAFTMPWTRTRAYPHAFIVPDEKRGGSYNYLTHVLFENVFWRGISGQINKWRQETLKLPKTNLDLLEQNKIPFMYNVSPTVLPPPVDFNDWVKVTGYWFLDEAVTYDPPKALLDFMQKARDDGKKLVYIGFGSIVVSNPKELTQSVVDAVVKADVRCILNKGWSERLGGSSSVEVDLPDEIYNSGSLPHDWLFPQIDAAVHHGGSGTTGATLRAGLPTIIKPFFGDQFFYANRVEDIGAGIGLRKLNVKTLSKALKDATTDQRMISKAKAIGERIRKENGVQDAINVIYRDVEYAKALIMKKRESWPTNNATVEHKDSAEEEMETEKLLSRMMTASASSDSALSGNASWLVL

SEQ ID NO: 7743 - protein, 422 aa, Bacillus subtilis
MKINLLTIGTRGDVQPIIALGKELSRRGHHVTICTEGSFKDLAEKNKLSFSPIRTDYTHLTQSEEGKSMLKGNPLSIVSQMKTVIYPMMEQMLDDIWTASIDADAIIYHPKVFGGYDIAEALHIPAFIAHPVPIIAPTRHFTNPVFPFAMQSGTLNRASFKINRLLTAAFFPLINKWRHETLSLPDKRSVFKDDSVLNGKHIPVLYGCSPSIIPFDQQWKGHVSMQGFWFLAEDDWTPPPELLHFLEAGPPPFTVSFSSMPLRNPDHTLNMLQQAFKETGQRAILLTGWSGIKQTTDSPHIYTAGSIPHGWIFPRSRAVIHHGGAGTTAAALKAGKPMVICPFSGDQPFWARKMRDIGVAAAPLKERDMTVAAFVSRINELISNNTYFQRASEAASLIDKEDGVRHTADFIEEKLEEKNPAK

SEQ ID NO: 7744 - protein, 1209 aa, Kluyveromyces lactis
MPKDSSEHQKSPSRFTRSMFVDPRAFVRRSVSPVDQLCHSVADLRFVSSNTETLESRLQALSKKFDNGSENHGQDTDTVEDVAKTQYMAKSFAGLIATASMYVGINELGDKEENDEDELELMNDAASVLDTSSQANQTLFEVSIEMNADAISQISTDSKSRKELIRERLIKKFLPNDDEKYIEEYPCWLLRDIMIQGHAYLTNKHLFFFAFIPNFESDFNVTGSLRLISGHVLSKSHRYWVVLKGHTLSFHNSSTDLYFPLLTIDLRDISSVQMTSSENNPTKFELSIKDQSLVLKADSFHSARHWVSSIKKQMFASQHSDTNTMTIKIPLQNIVDLEETSILDKSGTLRIKALENLSTYAVDEYFFVFFKGNANAMKQKVNSLLKDLEMNGSQILVNFNKVDSPLGINEKLPDLNYDDPSNENNLVDDADINSAETDTLSPGTMQSALTLQQTSSAFSPRHSAYPRKVKKKLKSMAGSLKLGSPSKFTKLEDDIIIEHYSPGLINDQTIDYDKDSKSIISRLTPKKFQNVPLMWAADPVHFNSDDGIVFPLDDKYTADADISNQSNVRFRQHFSFDETANLVASYHGYLNRNVPIYGKIYISDKNICFRSLLPGVSTKMVLPLEDVENCYKETRFRFGYFGLVIVIHGHEELFLEFGNKNARDDCEFVMIKVMDAVSSHRSTLKRKSTAEVVHRLSEAASLKLLEEKISEQGFDIPLIVEKNPYFTTVIKPSKSYKFGLLTIGSRGDVQPYIALAKGLQAEGHEVIILTHGEFKDWIVSHNIGFREISGNPAELISLMVQHGSMNMGLLRDASTNFSTWISSLLDTAWEGCQGIDILIESPSAMAGIHIAEALRIPYFRAFTMPWTRTRAYPHAFIVPDQKRGGNYNYFTHVLFENIFWKGISGKVNEWRETKLKLPKTNLVSMQQNRVPFLYNVSPIVFPPSVDFNEWIKVTGYWFLDEKRSYKPPAEFMEFLNKARELKKKVVYIGFGSIVVNDPEKMTDTIIEAVRDAGVYCVLNKGWSNRFGDPLAKKIDKELPSYIYNSGDVPHDWLFTKIDATVHHGGSGTTGASLRAGLPTIIKPFFGDQFFYASRVEDIGAGVALKKLNRSSLAKALKEVTTNTRIIQKARQIGESISKEHGVATAIGAIYSELGYARSLIKTKNPVDDKEMEAASTKLSNDAVVTAKGNEKEEYSSEGSGSNDGSWLLI

SEQ ID NO: 7745 - protein, 625 aa, Coccidioides posadasii
MDNASVFYRILTSISLLPTNQRSMSNTFWRLCELLAQQEKEDADNGGSEAYENEPDDSLFPELTRALDGSASSSNNYDLEPSEASNLSPPEAAPIHFDDPCASIVNFKPSESLRITCLTIGSRGDVQPYIALCKGLLAEGHKPRIATHREFEPWVRQHGIDFAPVEGDPAELMRICVENGMFTYSFLKEASLKFRGWIDDLLSSAWSSCQGSDILIESPSAMAGIHIAEALRIPYFRAFTMPWTRTRAYPHAFAVPDHKMGGAYNYMTYVMFDNVFWKAIAGQVNRWRKRQLGLRGTNLDKMQPNKVPFLYNFSPSVVPPPMDYGDWIRVTGYWFLDEGSSWSPPEQLTAFIQKARNDRKRIVYIGFGSIVVSDPTALTKTVIESVLKADVRCVLSKGWSDRLGDPSSAKTEVPLPPEIYQITAAPHDWLFSQVDAVAHHGGAGTTGASLRAGVPTIIKPFFGDQFFFGTRVEDLGVGISLKKLNVNVFSRALWEATNSERMIVKAKLLGEKIRKENGVEKAIQALYRDLEYAKTLVRRRSIAAASPPLPVPLGSPKARHDWEDDLAGIEDTWTLVGHPDIDMELSQSSKGRESEFDLRASAALATGTLPDIVVDEDDGEEDVTR

SEQ ID NO: 7746 - protein, 573 aa, Heterobasidion irregulare
MTNSLPAVMFTSTSSTFLTFKPKNPLRFTFLTIGSRGDVQPYIALAKGLMADGHHVKIATHGEFQSWVESYGIEFGYVGGDPTELMRICVENGTFTVSFLREGMQKFRGWIDDLLKTAWDACQDTDVLVESPSAMAGYHIAEALRIPYFKAFTMTWSRTRAYPHAFAVPERKMGGSYNYMTYVMFDQVFWRGTAGQINRWRRNTLGLPSTSLDKMEPHKIPFLYNFSPIVVPPPLDWPEWIRVTGYWFLDDASVGAKKWTPPPDLVEFIDSAHSQGKKVVYIGFGSIVVSDPKAMTRCIVDSIVQGGVHAILSKGWSDRLTKNVAEVPEAEEPLPKSIYPLASVPHDWLFKRIDAACHHGGAGTTGASLRAGIPTIIRPFFGDQFFWADRVEALGVGTGVRKLTVDSMAEALIAATTDHKQIDRAKLVGEQIRSENGVAIAIEAIYRDLEYARSLIRRTVHEDAVDAEDSTIREHDQSLSSLSSRPETRSEESSGNGAPSESGGGAPSEDWSVISDQDNTRSSTSSSRHNEGKDRTLSPKRSSLTAAVLSVLPDALTTSGHRRSRSASSVSTG

SEQ ID NO: 7747 - protein, 782 aa, Glarea lozoyensis
MDIEDSQIVDFADTCKIRVIDNDETFAIDESDQNASGPSLQNLVKAGAYPLQRAAGFAGYLNRHSKRMSTLLATESMGYVEKVSGMWKGGKKHYDEPEGLIADGEPHVEGNDEQAAISGDRFRDHFALPETEKLQAAYFGYLHRVLPLYGKIYISDRSFCFRSLLPGTRTKLILPLKDIENVDKEKGFRFGYSGLVVVIRGHEEIFFEFSQPDIRDDCAITLLQNLEGMKFLQESGLLSMEEKESAQNASAEHKALQKARLEENPSHELKLPQSAEESKSEAPPIMFDDPRASILNFKPTESLRITCLTIGSRGDVQPYIALCKGLMAEGHKPKIATHIEFKDWVESHGIAFEPVAGDPAELMRICVEYGMFTYSFLREASSKFRGWIDGLLSTSWKACQGSDVLIESPSAMAGIHIAEALEIPYFRAFTMPWTRTRAYPHAFAVPEYKLGGSYNYMTYVMFDNVFWKSIAGQVNRWRKNELGLQSTSLEKMQPNKVPFLYNFSPSVVPPPLDFSDWIRVTGYWFLDEGGQDFQPDKDLMDFIAKARSDGKKLVYIGFGSIVVQDSAALTRTVVDSVVKADVRCILSKGWSDRLEKKDANKIEVKLPVEIYPIKQVPHDWLFSQIDAAVHHGGAGTTGASLRAGIPTIIRPFFGDQYFFGSRVEDMGVGIAVKKINPEYWAQENGVNTAIQSIYRDMEYAKSLIKSRKGKPSDDNIEDSEESWTFIGDENDPELVKRIHNWDSVAQLGTLNRKNEGLAGSDESGNSIESRFNQKASLQADTG

SEQ ID NO: 7748 - protein, 409 aa, Kribbella soli
MRFVLATWGSRGDVEPLAGLAVALQELGAEATVCAPPDDDFEALLARAGVPMAPLGPSVKSVVAAPKPPSGQAAFELAPRLVAARFQTLGAVVQDADAIVATGLMPAGARDVADKLGIRYVLACFHLGGIPSQHFSPGARPGTPSPEGETDRRVLWQHDAERVNALYGPSLNSHRAEIGLPPVESVRDYVLTEHPWLAADPILCPSKGMTDLDVVQTGAWLLPDDRPLHDELEAFLGAGEPPVYVGFGSMAAYAPKDIARTAIDACRAHGRRVLLSRGWAGLDLADEGRDCFMVGEINQQALFPRVAAIVHHGGAGTTTAAARSGTPQVVVPLIADQPYWASRVAALGIGAAHERATPTVDSLAAALGIALSSETQAQAAKTGGEITTDGARVAAGLLVDGAMEGVKKV

SEQ ID NO: 7749 - protein, 1647 aa, Stemphylium lycopersici
MTRPRPDSTQAPIPVAYEYDDDRHDEEAPPPYTAEELTGSIPQPGDTKATNDGRIEIDLNSRLTKTLIKLVPKHDKEEPELSRRYTVTNLWAIRLNIVIQVVGSRGDVQPFIALGQELQRHGHRVRIATHNTFESFVRESNLEFYPIGGDPKELMAYMVKNPGLIPSMKSLREGDIQSKREMITEMLYGCWRSCVEPDLQSRQPFVADAIIANPPSFAHVHCAQALGIPLHLMFTMPWSSTRAFPHPLANFKVGVISPALINYASYGIVEFLTWQGLGDVINDFRRTLDLEAVPISVGPVLASALKVPFTYCWSPALVPKPPDWPSHIDVCGFFFREPTPYTPLDEIDRFLRNGLPPVYIGFGSIVLENPAKMAANILEAVQRLGVRAIISRGWSNLGSDLPNDNKDVLFIGDCPHEWLFQHVAAVVHHGGAGTAACGLRNACPTLVVPFFGDQPFWGEMIAAAGAGPQPIPHKLLTTENLTQAIHFCLTREAKHAARGLSAQMASESGVEAAVQSFHANLPMDTMRCALIPTMAASWKTKKDSIRLSKIAAQILIENGILVPSDLENHETYPIFITNPRWDPVTSTTSACVGIVGDMGIAAKSMVIDPFTGPKPEIASSSSSTSSKKQSGGAAAGRVAVDVSKGFGKFVGAYFKGVIVDLPLATTEGFRNVPKLYGEEVKDHGNVTGALSGFQVGGKNFVQGMADGLSDPFRQTYEGGKKEGGIGYAKGFGKGVAGLLTKTSAATLGIVAYPGDGIVKSLKYLAKSGTRKRIRASKLVESEWLGGKTEAEFNVRELIQEFERLKKGVCERCHRLRKECTASSSIRKSNANTIPASKRSRLEEKLDEVASLLRAQRVPTSQPSSDNLSILTPDSTTQWRNDVNSALSESLTNPQLADLRANYLKYFPFMYLSEDTTAGDLQLHKPILCLAIRTACTKAITRQSEMAKALREMLATKILVEGERSIDLLLAVIMCIACLARSLVTDLRLDRPANPSGCPSLGPHLESWGARSNEGSRALLAVFALSTNVSTSFKYDIVPWSTQHEEACNSLSQSQESDADAILIAAARLLKIASTATDVHRRALDDPSMVSHAMVAIEPMKLALNSFMATLSPEQLQHSAIIGFTHTAQVAIYELAFLQSLPSSATVAPVQHYDFDARRIRTELGDPWSSARLSRVSRLSSTRSMTLGGTLVHTRSPPHSLRFRATLQPLSGKLYMHFNNKAVFLLFVLLFEIGSLVCGTANSSAMFIAGRAIAGLGASGISNGAMTIISGAVPREKAPSFYMNLPIGGATALLLLIIQIPEITEKAPLSMTLVRTVIPQLDLVGFTLFVPASTMLLLAFQLGSGDTYSWDSPTVIGLLCGACVSAIVFVFWEYKMGDKAMLPGTLLGKRIVWTSCFYGSCTMICMLTASNWLPTYFQAVKGDDPADSGVHTLPGIFSQLLLIIATGAAVSRTGYYLPWGLAGAIVITIGNGLVSTFTASTSTAKWIGYQIVLGAGRGIAMQIAIIATQNAVLPAQYPIALACLIFFQNLGTSIAIVIANTIFSQTLTSVIPRYAPSVSPQAALDAGSGADAVRSLIPAVSKNELAGVLRAYSESLRDVFYFLVGVAALAAFVSLGMGWKDVRSKKHEETIDKAPDEKLGENKAAENA

SEQ ID NO: 7750 - protein, 1244 aa, Escovopsis weberi
MEFPEPLRYSDDERRAEALLSDGPPMAVNMNQSIFGLIAAAGSRVDFNDRFDGSSSDDDGGDDDDDDNDKNIDDDDDGGGGGGGGGTPRSESARRQRHKLSQTALFHHPLKDKRRSHNPRLSGHRLLKSFASLPTRRSKPGRETSKLSEPTEEVEEPQQPDDSPSPDAIDQAELQEELRLAPVMGRMLEAKAEIANRPSSDLERPSSASASASALPHQPEEDDSASPLAKRLKEIFEFDKPERHAVAKSGFLSKSGKRTSKYSRYWFRLKGDVLSYYPDSTNLYFPNGQIDLRFGISADITDRDKEGVHFSLVTSHRTYNFRADSAPSAKEWVKSLQRVIFRSHNDGDSVKISLPINNIIDVEDSQMMEFSDTCKIRVIDNDETYAIDEYFFSFFSFGKEAIDLIKSMVENASAEGPTAAREIAAFEERASDASSQGLAPYQARSDTSERPFDRIRTLKPLDTRAQTTGHSEALGYQRQTDTPTPSTPTLQSITKMGAYPLQRAGAFADYLNKTSKRMSTLFATESMGYVEKVSGMWKGGQKHYGEPSGFRPDGDGAEEDGQDGAEVSMERFRAHFALPDTERLQATYFGYIVRVLPLYGKIYISNKYFCFRSLLPGTSTKLILPLKDIENGQKEKGFRFGYSGLVVVIRGHEELFFEFRTAEIRDDCTVTLLQSLESNRVLQDSDVPDAEDEDNIISERLARKMAKGEELAPRQVQLIQRAPGRPDSPTPLVDDTDASSINIRPPQAMNITCLTIGSRGDVQPYIALCKQLLKDGHRAKIATHAEFQGWIESHGIEFACVEGDPGELMRLCIENGTFTISFLREASATFRGWLDELLDSAYRACQGSDLLIESPSAMAGIHIAEKLGIPYFRAFTMPWTRTRAYPHAFIIPEHKMGGAYNYMTYVMFDNIFWKATAHQINRWRNKTLGLPNTNLEKMQPNKVPFLYNFSPSVVAPPLDFSDWIRVTGYWFLDEGRDYEPPRDLKDFIQKARDDGKKIVYVGFGSIIVPDPAKMTQEVIDAVIKADVRCILSKGWSDRITSKNEPRRVSIEEPEMPPEIHVIKSAPHDWLFRQIDAAAHHGGSGTTGASLRAGVPTIIRPFFGDQFFSASRLEDLGVGVWVKQWGTNSFGRALWEATRNERMIARARLLGERIRKASVEIAVQSIYRDMEYAKALIKAKSGQSETEDDDDTEESWTFVRGDEPDPDMVTPKLSEGLEGLGLGSGAIKANDLKGKDGRPVMRADD

SEQ ID NO: 7751 - protein, 1421 aa, Nectria haematococca
MAPQSDAAPVRASVGDDHVKKRVSRKLHKRRREDLSATIFPEPLQESDNSGDEDVVPTQGPPMFMNMNQSIFGLIAAAGSRVDFNDRFDGISSDDEESPEPKDREGRSEDMSKTSVLKSAGKEKGHRRRKLSEHKLLRSLPALPKFHTKSKRHSSRLSAPAEVADESSDASQSGLSTPPTFAITRHDSHGRQAPVMSRMLEAKAEMTSRPSFDLDRLSSDASRSSDSQEPQPLAKKLMEIFEFSEPERVIEEYPCWLLQSVLLQGYMYITSKHICFYAYLPKKAHEAAKSGYLSKSGKRNPKYNRYWFRLKGDVLTYYASSTDLYFPHGQIDLRYGISATIVDKDKEGLHFQVETHHRTYHFRADSAPSAKEWVKSLQRVIFRSHNDGDSVKISLPIENVIDIEDTQMIEFADTCKIRIIDNDETYAIDEYFFSFFSFGKEAINVLKILIEDTSPANRSAEQIPPSARTSMAANRNSLHVGKLRTTKLPDTVKATLSPMSPSSPSQLSPRASMDAPRSSFDALKNFGRKSIDVSRPPIRDISPRTSFNGTRRSMSRRRREGTTTPKQALDSGDSFLQSSVEDPSISTLAPSSLEDPSASQILRGSEVFHNPTMRRSASASRKVSPDKNVPRNSSAPRIRPIVHAATTGSMQEMQGEGESSQRPLTPTLQSITKMGAYPLQRANAFAEYLSRTSQRMGSMFATESMGYVEKVHGMWKGGHRHYDEPSGLRPDDDDDEEEDGKIQNLMDRFRAHFALPESEKLLATYFGYIVRVLPLYGKFYISDRSFCFRSLVPGTRTKLILPLKDIENVHKEKGFRFGFYGLVVVIRGHEELFFEFRPPEIRDDCAVTMHQILETSRYLEKSGILEQEEQEDEDVAIAERDALKEARQDEFADHELQLPHETSGVSNAPTILFDDPNASALAFKPQKSMKVTCLTIGSRGDVQPYIALCKGLLAEGHKPRIATHAEFQGWIESHGIEFARVEGDPAELMRLCIENGTFTWSFLREANSTFRGWLDDLLDSAFKACEGSELLIESPSAMAGIHIAEKLGIPYFRAFTMPWTRTRAYPHAFIMPEHKMGGAYNYMTYIMFDNIFWKATAYQVNRWRNNTLGLPNTSLEKMQPNKVPFLYNFSPSVVAPPLDFSDWIRVTGYWFLDEGGEWEPPQELQDFITKARADGKKLVYVGFGSIIVNDPAKMTQEVIDAVHKADVRCILSKGWSDRISSKEDPNKPRAPEPEMPPEIHVIKSAPHDWLFRQIDAAAHHGGSGTTGASLRAGIPTIIRPFFGDQFFFASRVEDLGVGVWVKKWGTNSFGRALWEVTRNERMIVKARVLGEQIRSEAGVENAIQCIYRDLEYAKSLIKRKAGKNEQPDSGEDDDTEESWTFVGRDEPDPDVVTKKLSEGLAGLGTGSERSLGSQVQSSVAT

SEQ ID NO: 7752 - protein, 1243 aa, Starmerella bombicola
MQETLSSQQPDAQPQRISNSEEQQYDDSAFNSDADDEDGLEKIQRFFTGESSAYYGQDDEDLNAREREYVTQLLSEEGEAGLSVGRFEGWLGKTVLLQGKIFITNRYFLFYAHLPVTNGTLKASPLAKKSVRHLVGIGKASYIRFWFVLRAGALLWYEDPGDIFFPAGLLSLNLMSEIRVVPEAPEKFCIKSLTGKVYTFKADSRNAANEWVKAIEKEIFKARNNNTAPSVVVRIPLKNMISLKTLKPLDFVDVIEFLAITQGSVNPAESQVGKFTFAFFGDQKTLNSIIDRISTSTNNFEHQKGVKFNTTAEGEELDLAHSQVGPVDESVFDTTRASNTDVFEFKYVSDDREAVRLAGEDETESGSQVSSQLTSEHSSSLNLSPISSHGNRRSFFSKSSLRSSTLLHSRIPTRSGTPSKSPTPTDSYSHSKSKTNLFSTLNEKLHKLKHDDSKIDLAPIIAMPKKLIPNLGEQSHDVSDTEEGADSDDDEESQDDSKINLNLPQVLSQKLSIFSSDPSTDTSMASEAQSSQLDLNSLNQKFRERFGLPSFVNLLAEYQRSFKKPNDSSSWSGTLLVASDYLCFNRQKSGSSCHRMIIPLKDIIHIKKEPMQSSNLEFEVAETAYSEFSLKFPEPADRKDADDMTRSVWQQQRTKDEGNTLRGNSNNHDTIDSEAQFLEYSLRSARLSTYEPTVTSQLKRRIPPLMFDPTSTQYKEIFLQKPMKTLTFAMMMIGSRGDVQPYLALCQGLMEEGHKCIILTHGEFKETVEGYGIEFREIAGDPRELMELMISHGSISYSFIREVLSHFKSWLKELMKTAWKAMKDSGADVFIESPSSMIGIHIAEALNIAYYRAFTMPWTKTKAYPQALLAPDQKRAGNYNAFTYVMYDRLVWFGISKYVNKWRKHMGLPETDLDTLHQEDVPFLYCVSPTVLVPPLDQPDWVHTCGYWELRPNEDKKESGDAKVAAFIKKAREDKVPVGYIGFGSIIVSDPEAMTQTIIDAVDQSGVRCVVARGWSSRSTKKKDNDDESDSTEKKPLNHENICDVDSVDHQWLFPQMDVCVHHGGSGTTGASLRAGKPTIIKPFFGDQFFYGRRVEDLGVGRNLKKLSTKGLAEALKECTTNKQMIRQADVLGEQIRHEHGVEEAILCIYRELAYAKDVTIRRRNATLEASKNGLFSDPLGLLNPAELFSHKDRSEAEILEKEDGGAAKNKDKDHLWFTLPKFGRREEQRQNRDADDEIDVSV

SEQ ID NO: 7753 - protein, 431 aa, Chondromyces apiculatus
MKITLLALGSRGDVQPSVALGKGLAARGHTVRVLAGTNFHPWIVKHGLETAPSSLDMQDIMRTEWGVAWAEKGTNPLLASRAVARIHEQFGWALTEDILHACEGAELILSSFTSDFQACSIAEATGALHISVPLQPSALATRHGPSSLAAVVPGKDSVLNQLFAKAMVEPTIWRWTGANVNRLRRERLRLPEHTRSTAFEALRRTPTLHGCSAHIAPRAPDWPADWQVTGYWFLDEAEPYAPPESLTRFLDAGEPPVCIGFGSMPASDPAALTRMFIDAISRSGRRAILLSGWAGLGGVPLPDTFFQIDSAPHDWLFPRVAAVVTHGGAGSVAASLRAGRPTLVVPHMSDQIYWGRRVAELQLGPSPIPRPRLRADRLAEAIALTSDPAIRRNAEAMGAKIRAEDGVTTAVDAIEGIIAARRPEGSSARGR

SEQ ID NO: 7754 - protein, 1239 aa, Melanopsichium pennsylvanicum
MDGARAGDCVRTKAPVKISSEEKMKALIEEFGECPSLSSPNEPEKLIIDLSCVLVKTVLIKGSVFLTNRRICFLAYIPNVDVNASSPSAVNKPASQNHADSSVRAPVDPNVQNPILKSGPAVIHRPGKMRAKRRVWIELRKTSFNAYAASNQLYKPLLSARLSNLHAVLPIDWAHPNIIRFVEGNKYSSVEFKTQEAALDWRNELEAAAFHARNTAEKVRISIPLERVVGMDSAPFLQVVNVIHIDVLVGSVKDADAAKSIKEAKVKAEYRHLVEQNWPTNHTFINCPKNPGFKCQITQVAIGFTHDRAAFIDLLREALKVPRSTHDPLGYQELLRNVPTPLLDFQGDADADEQHSDRHDDSAPDEQNQSLADKFCHAFGLPSRPEELHLVKAELVRTLHTHGTMAIGLNFLLFWRRAVGRDLRIKVPLTDIQGVDSYRSMLWHHHGLVVHIRAHSDMFFDFLNKENRDMVLSTLKGIVKAKEDQAKSPNAESHANRVESLANSTDSAHGTVKKSLFTQALLSNAEAEVPVFEPDVLAYVPKVVNVDRDVARDAIRISPMRIYCLTIGSRGDVQPYIALCKALKKHGHTPVIVSHPEYRGWVEGHDIEYRGVGGDPAALMKLSVEHRIFSPAFFRESIGKFRVWLDELLRECWEECQGADLLIESPSTMAGIHVAEGLGIPYFRAFTMPWTKTNAYPQAFSVPSIEMGPSYNSSSYALFDQIMWVATSGQINRWRKHMVGIGPTDLNKLDADNVPFIYNFSPAVVPMPNDWGDRVKISGYWFLDNPESNWKPPKEMLEFLVKAKDDGKKIAYIGFGSITIENAEEVSANIMKAVRESDVRAIVAKGWSGRGGSSKKKKKQQQLAKLKPALQQHHSSSTTHESEDNATESETEREPEIPSDVFVVDSVPHDWLFPQIDIAMHHGGAGTTGASLRAGLVTLIKPFFGDQFFWANRVAKLGAGARVNGLSVSDLTDALKAAASDRIMVEKAQGVGEKIRTEDGVATAIEFLYKNIPLAKRRTQRHIEREMSHASPAGTPSSSVFTNPLARFSSHSRSNSGSNTPRRDQHRSATLPPTGSSSAALSLGSEIDDGSRVLHKSTSTIVESPSNESSTDFTSSKSDHKSRKSSGSILPSLSSFSVLPSNMVASLKEMTTLQSNTSDTTADGEEARVGEKSATLTPTSSVVTGEEETEEHKLARLKGYKNAKAEDIRRRKLLLEKLERERVEKEEEKERKQRENKEG

SEQ ID NO: 7755 - protein, 885 aa, Fusarium langsethiae
MALNRIKSRGRGHLVIDDYDANNGPTSNVIDDGRVEVQFHDNPQALAVWCQHFKDSFAGDTLSSERLQPPEPRRTNSIAFVPGVEKPAESPRLHIAIQIVGSRGDVQPFIPIAQLLMKPPYDHRVRICTHAAFKEFVEAQGIEFFNIGGDPEALMAYMVKNPGLLPNCDSLKGGEVGKRRKEMAEIISGTWRSCIEAGDGMGEPIKAANVESADDLFLADLIIANPPSMGHIHCAQKLSIPLHMVFTMPWSPTKSFPHPLASMSYGDADAKVANYLSFMMMELLTWQGLGDLINKFRTQTLHLDPVSPLWGFQLLSRLRIPFSYLWSETLIPKPSDWDDHLNITGFSFLPLASSYTPPPELVSFLENGPMPVYIGFGSIVVDDPQALTTMIFEAIKIAGVRAIVSKGWGGVGAGEVPEGVYLIGNCPHDWLFQHVAAVVHHGGAGTTAAGIAAGRPTVIVPFFGDQPFWGQMMARAGAGPVAVPYKGLTAEILAESITFALRPDVITVAKDMALQIGEEDGSGGAAMDIQERLDIDSLRCDLSPGRLASWLHRKTGAHLSGFAVGCLRDHGLIEMSDLKLLRHKHWYVDEGAESPAIGAIAAVSGFAAAIGTATSDYTERLRNSPHPGTARRRSSIGLRKFPTTEDGTMDPRLRSQKGPRDVTQADMEALAQKMASKTLYGAEPAFSAARLCRPVSEAHQDRKNSWRARERGSNGRVFYVTRVTGKYACDLAAATARAPVAFFYNVANGFHNAPSNVFDIDVRRRDEITGLGSGVRTAGKEFCYGIWDAFSGIVMKPYEDTKNLGVKGLGRGLLRGGLGIIGNLGTACFGLPGYTLKGLEKELMKRYMTNLKAEILLIRLRQGIEDWRRGRESEKDEVVRRWKIV

SEQ ID NO: 7756 - protein, 855 aa, Friedmanniomyces endolithicus
MSASQMLTGDTAFREPTLHMPQPRRTFSGSTVERLRRESQRRSPSRTSDEERIHVQPPSLTAAEDPPSSGRGHFIAKKDSKKLHPAAVVPAASRPKRTILATPLQYAYGLADHMRSQGKRGLSYLGSSPKDYYTKFSGAMAGGKRHYSEADGLAPESHIEDPEDDLDTVEHERRFQQHFALPESERLLAVYYCSLHRVLPLYGKAYVGTRNFCFRSLLYGTRTKMVIPFKNILNLEKEKGFRWGYPGMVVVIRGHEELFFDFSSNGLRDDCVVTVLRTLEAVRALQESVILTPHEKKDADAAAAENQLLSGVRKDLHADRDADPSEILSRIESGTPMIFDDPNASILDFKPTKAMRITCLTIGSRGDIQPYIALCKGLLADGQHPRIATHREFQGWVEKHGIEFAPVEGDPAELMRVCVENGMFTPRFLYQATSQFRDWFDGLLTSSYEACKGSDLIIESPSAMAGIHIAEALSIPYFRAFTMPWTRTRAYPHAFAVPSHKQGGAYNYMSYAFFDNLFWQISASQINSWRRKHLGLKPTSLEKLQPNKVPFLYNFSPSVVVPPLDFSDWVRVTGYWFLDEGTAWTPPADLQAFIDKARADKQKLVYIGFGSVTVSDPRELTQHVVDAVLKADVRCILSKGWSDHFDKKDASVPEVPLPPSVFQIRSAPHDWLFKQIDAAVHHGGAGTTGASLRAGVPTIIKPFFGDQYFFATRVEDLGVGIHLRKITVNALGKALWIATHDDRMRGKARLLGEQIRNEDGVTTAITAVYRDLDYARTLIKKREVKIEGGGEVEDTEEAWTFVENDSDGDVARLGEPEVVWPASSSRAQGSWGGGGAYGKRTSLGSMVLRGGQRTG

SEQ ID NO: 7757 - protein, 1327 aa, Drechmeria coniospora
MNQSIFGLIAAAGSKVDFNERFDDGSSEDDDGPEQPRRDLAQTAILKPHTPDAARRHKRLSGHRLLRSLATLPKRIPKPERGAGRPSVPLPLLTLDDRSASTELAEPDENRLAPVMSRMLQARAEMSSRPSFDLERPSSADLSGVDDGDNHMLLARRLKDIFEFDDVEQVVAEYPCWLLQSVLLQGFLYITAKHICFYSYLPKKANVVAKSGYLSKSGRRNPRYNRYWFRLKGDVLSYYRDSTNLYFPHGQIDLSVGISADVVDRGKNGVHFEVVTSHRTYSFKADSAPSAKDWVKSLQRVIFRSHNDGDSVKISLPIDNVIDVEETQMMEFSETCKIRVVDNDETYAIDEYFFSFFKFGEEAVNVLKILVEDASGNEAAEAVAGLSVDGSPRDSKNTSRSNLLTDRARSTKLPETVKATLSPLSTHSGGASPRPSLDVSSRTSFDAVLHLGRRSHDVPSPLREQGPRRSFSGSRSQSLRRRSDRSRPVASSDSNVPSSTDEPGYSNVAVSTTEDPSASQILRGSEVFHSPTMRQSPTSSPCADARPGLPHHCATTGHMEQLAYRASLDPGRSSTPSLQSITKMGSYPLQRAGAFADYLNKTGKRMSSLFAAESMGYVEKVSGMWKGGHKHYDDPHGLRPDDDDLEQDSEGKVQTSMDRFRAHFALPDAERLQATYFGYIVRVLPLYGKIYISDRSFCFRSLLPGTRTKLILPLKDVETAHKEKGFRFGYAGLVVVIRGHEELFFEFGPAEVRDDCAVTLLQSLETNRFLQASGVLRDDEADDEDSAMAERDALSSARQGEYPEHEIEMPSQTHLPNAPTILMDDPDGSFLSFKPAGSMRITCLTIGSRGDVQPYIALCKGLLADGHRPRIATHAEFQGWVESHGIEFRRVEGDPGELMRLCIENGTFTLSFLREANAKFRDWLDDLLDSAYHACEGSELLIESPSAMAGIHIAEKLAIPYFRAFTMPWTRTRAYPHSFIMPEHKMGGAYNYMTYVMFDNIFWRATAQQVNRWRNSTLKLPNTSLEKMQPNKVPFLYNFSPSVVAPPLDYSDWIRVTGYWFLDEGDEYRPPRELEDFIQKARDDGKKLVYVGFGSIIVDDPGKMTQEVIDAVLKADVRCILSKGWSDRISPGDDPEKPRPREPDIPPELFVIKSAPHDWLFRRIDAAAHHGGSGTTGASLRAGIPTIIRPFFGDQFFFASRVEDLGVGVWVRRWGTNSFGRALWEATRNERIIVKARVLGEHIRQETGVADAIQSIYRDLEYAKSLIKRKPGSKPDGEEDDEAEESWTFVGGDEPDPDVVTRRLSEGIVGQSAESKGLGSQVLKGRA

SEQ ID NO: 7758 - protein, 922 aa, Trichoderma virens
MASRTQRSRQKSVVLGEFGKCTGRAQPDGRMSITVHDTAHTGYIANAVGAVKYSMQSRRKMTAADARENAPKLAQIPQKLNIVIMVVGSRGDVQPFLRIGKQLKEDYHHRVRIATHPIFRDIVESQAGLEFFSVGGDPSELMEFMVKNPGLIPTFRTVKAGEIGKRRAAMATMLDGFWRACIHATEDDCTSLQANASAPNAFADKDIFIADAIISNPPSFAHIHCAEALGIPLHLVFTFPYTPTRAFPHPLANIKGNTENAKDGGYANFMSYPLIETMTWQGLGDLINDFRVRTLALDAVSTFWAPYAIYRMHVPFTYLWSPALIPKPNDWGEEINISGFVFLDLASAFDPPQPLVDFLNAGEPPIYIGFGSIVVDNPKSFTKIIFDAVGKAGVRALVSRGWGGLGLDKDQVPDNIFMLDNTPHDWLFPKIKACVHHGGAGTTAIGLKCGLPTMIIPFFGDQYFWGSMVGKSGAGPKPIPYKRLNYENFAEGIGYLLTEEAKSAAEEIAESIRADGDGAKNTMESFQRQLKMYGPPTLSCSIIKSDVAVWKVKGTHIRLSTLAAAMLVDGGHLSWNKLRLLRHSEWSDFGGPGEPITAIAESLKNSVRDVFQGIASAPYRLGRTTKQRLRQRSRKKSKEGNATKPLPNASNEMSGSAATSCTGNPRTRRQSLIPVSHVQYGRDISSSLIETGSALAKAPTLFIVALAQGCHNAPRLYGDDTVRRLHRVTGFHSGLVASRREFVYSIFDGVTGVVTLPIRGTRNEGAVGLLKGMGMGLGGLVLKPLSAIVGPVGYTMQGIMKQIQRRNSPQKFVRLARIAEGQRGVSELHGTEAEMVRRQIVAGWEVLQELHQAVADTDRWAYLTGKASKVEFLFINVDRAKVYLDALKSGKSVDDVMAMYEAWNIKPQDPAMKKTNSSGTRC

SEQ ID NO: 7759 - protein, 792 aa, Botrytis cinerea
MSDRVKNRGGDFENQKLSEDVHINWDQPPPYDAVLHGSSGNISATITDDGRLDVCINAKAASSGILPPILPDNSSSHEALVATYSAHPPLNIVIQIVGSRGDVQPFIALGQELKASGHRIRIATHGNFKDFVESSELEFFSIGGDPAGLMAYMVKNPSIIPTFDTLRSGDIGRKRKMIYTMLNGCWESCIMPDATTGIPFVADAIIANPPSFAHIHCAQALSVPLHLMFTMPWSPTRAFPHPLANIQNGDGDPRTANYLSYGLVDMMTWQGLSDVINLWRKKSLNLEPVPNMAGTGLAEALKIPFTYCWSPALIPKPVDWPSYIDVCGFFFREETPYTPDRELAEFLKSGPMPIYIGFGSIVMEDAAKMTDIILEAIRACGVRAIVSKGWSKLGTNRSDPNVLFIGDCPHEWLFKNVSAVIHHGGAGTTACGLLNGRPTSIIPFFGDQPFWANMVAAVGAGPRPINFKALDSAKLTAAIRMCQEPETGRAAALIATRMKDERGVKEAANSFHRNLPLDAMSCDVLEGQNAVWLWRRKTYQVKLSDRAAYILLKNKKIEAKDLTVQSRPFVIENPRWDPLTATSSALLGTIVDFSAVLWNTVADPYKAFNVAPDSRADKISSTGGAIGHSMVALGGSITKATLVSVPMALADGFHAVPKLYGEKVRDHGPLTDWKSGGVVAGKSFGYGFYDGITGIVTQPMQGAKKDGALGFAKGLAKGTVGLITKPGAAMFGLMAYPAMGLYKSINEMGLSTAQKQVLKGRQMLSAYINEKMPPQEAEIGTVLEQFELKKKR

SEQ ID NO: 7760 - protein, 1382 aa, Acidomyces richmondensis
MAASASSAMQFQSSFKRRLGSKKSANSQRPSVDMPECLRGEEDDDIDATGAFDAMGPAQVQQSLYGFIRAAGGQFGAVFESGIASDSENDTEFEDEGKDIFDSARNPSEATGDLSSLEDQRGNSQLKPLPHRKGKPLAQMLMKPIRESNEVHSDDTMSQSQFLPPRETTRDALELPANSLDVHKQDAAVDRILQPEANMAMENSQTSLVQKRSKEQLCNDSSRDNKKQLSRLPVAVADIFGFDDLEQTVIEYPCWFLQNVLVEGYIYITNKHVCFYAYLPKKRSTAIKSGSLSKQGKRNPRYRRYWFELKGDVLSYFASAADPYFPRGAIDLRYGISAELDQEKGVPTTAFTVTTQSGTYHFKAESAPSAKEWVKQLQKVIFRSRNDGDSVKIVLPVVNIVDAESTGMMGRQDTIRLRVIDNAETYAVDEYFFTFLKHGQAALDTINGLIENNSLREVANPAGRGVSEQGIPDSMAIPSSKGYQSTNEISDWFPGHVPPSASSMRSTVSRQTFGSTGGPKPRSSDEFDRPSEERSRASIGRKCLNTDQGRQIPKLADRGNWYGAQQTSKPTPSSSTEESSESFTSSDHVEAPTGCIQADMSASQILGGDKMFQSPTIRASQHHLSVPPSHQSPDLSIGIQRARDPRSIQVSRRTSLPPLGGMSMRILATPLQQAFNLYDNMRNQSKRGLSYLSGSPKEYYSKFSEAIAGGQKHYSDLNGLPEDRIDDPEQDLDASEHQRRFQEHFALPKSERLLAVFYCWLHRVLPLYGKIYIGEHFFCFRSLIYGTRTKLKVAFKNMLNVEKEKGFRWKFPGMVVALRGREELFFDFTSNGLRDDCVVSVLRCLDNVSLVQSSVLLTEDERKDAQKAAAENERLEMARKDFNSKFNMPSSAKLDGFETESQSILFDDTEASVLDFKPTKPLRITCLTIGSRGDVQPYIALCKGLIADGHKVRIATHHEFGPWVKQYGIDFVPVDGDPAELMRLCVENGMFTPSFIFEVNFKFRGWLDKLLNSSYEACKGSDLLIDSPSTMGGIHIAEALGIPYFRAFTMPWTRTRAYPHAFAVPGHKRGGGYNYMTYMMFDNLFWQITAGQINRWRRKTLGLKPTSLEKLQANKVPFLYNFSPSVVVPPLDFSDWIRITGYWFLDEGEQYVPPADLVAFIDKAHEDKAKLVYIGFGSITVSDSKVLTQQVVGAVRKAGVRCILSKGWSDRLSQNKQDPSALEVPLPSEIFQIKSVPHDWLFRQVDACVHHGGAGTTGASLRAGKPTVIKPFFGDQHFFATRVEDLGVGIRLEGITVNSLGRAIWNATHEMRMREKARALGEQIRREDGVGTAIKAIYRDLEYAKTLIKRRDLYTADEDADTENAEEWVYVENNVDIDLTST

SEQ ID NO: 7761 - protein, 410 aa, Sorangium cellulosum
MKTTVLAVGTRGDVQPAIALGKALAARGHDVRVLAGKSFQAWIEAHGLTAIPASVDTVDIMESDLGKAWVARGTDPLAQPRILQQIIDRYGAEMSEDALRACEGAELILSSFTSDTYAASIAEASGAVQVSMPLQPSILATRHGPTATVAPVPRGDSALNLLVGKLLIEPTVWRWYAGVTNRVRERLGLPPQGRRAYLATLRRTLVVHGYSAHVVPRAPDWPPGFHTTGYWFLDEGGAYRPPEALERFLAAGEPPVAVGFGSMTSHDPAATTRLLVDAVVRSGRRAVLLAGWAGLGDAALPDSILRIDAVPHDWLYPRVAAAVIHGGAGTVASCLRAGRPAVVVPHLGDQLYWGRRVEELGVGPRAMPRPRLTAEALAAAIHAAATDAGMRQRAEELGRKIRGEDGVATA

SEQ ID NO: 7762 - protein, 524 aa, Citrus unshiu
MAEPPVKSRSSSSSSSSEVSIKLEREIEGDSIRDRPSVPSIPRTNSYPVEVLSSKKLEPQTSSQLRLERAKTETHRPRAILAKHAAQIFDNKIPVQQKLQLLNRIATVKDDGTVEFEVPGDIGPHDLGAASQDVYTEVAHDEPLDATDLQYIPPLQIVMLIVGTRGDVQPFVAIGKHMVKNKGFLPSGPSEIPVQRNQMKEIIYSLLPACRDPDLDSGIAFKADAIIANPPAYGHVHVAEALKIPIHIFFTMPWTPTSEFAHPLSRVKQPAGYRLSYQIVDSLIWLGIRDMINDVRKKKLKLRPVTYLSGSQGFDSDVPHGYIWSPHLVPKPKDWGPKVDVVGFCFLDLASNYEPPESLVKWLEAGSKPIYIGFGSLPVQEPEKMTQIIVEAFEQTGQRGIINKGWGGLGNLAEPKDSIYLLDNIPHDWLFLQCKAVVHHGGAGTTAAGLRAACPTTIVPFFGDQPFWGERVHARGVGPPPIPVDEFSLPKLINAINFMLDPKVKERAVELAEAMEKEDGGFLS

SEQ ID NO: 7763 - protein, 1270 aa, Lachancea quebecensis
MPGRKPDIDEATNEARQRSSAIVESPKRRWRRSMPPVGRMYQSFTSFASPNRNSSDGGSNNPTFSDEDSPDVQTGEEKDQEHDLAIPCGMAKSIVGLLTTASVYAGMGDIEQAESICEDEDSDASDGSEGTNRSEALERSESCEDSEAPKVDKTDLEDVSESSRHSITANGADDDAGADDSTTISETPSQISKKDTLFEISVVPNSDLQSVVTSSSKSRQSKIYRKLISKFGLNEEEDQFVLTCPCWLLKDLLIQGHIVLTTRHLLFFAFLPKSTGATKMSGNLATVSGRLRGRWTRHWAVLKDHTLSFYNSPKDLYFPILTIDLRYATKVELSKHDGEATGDFRIFTEGKTFKFRADSNYAARSWCSALKKQVFATQNSENDSLSVKIPLANIIDMDEQLVVAQSVTLRIRVLESSQSFAVDDYFFMFLNKKDLKLKETINTLLLELDRVSPEELGNAAIANETAESALVDESTQKDSHPGRRGRSSSTSKKLFKRVLSPMSRSPGHSLSMSISIPFSTKSSHAGKGRLRSVTDSFSRKMPTGNVEEHMSVKNPADVEDEPSKEDQDAISKETTAFESMPDSTDEGKGRNFRLASWTPKPIKNMGNMWNAHPVHYQTKGPDMFPGDDPYLAAPKDQSIASKRFRSHFSLDSTEFLHAAYYTYLNKNIPVYGKLYLGTSVVCFRSLIPGTKTKMILPIKDMENCYKERGFRFGYFGLVLVIHGHEELFFEFSLQNSRDDAEFAVLKLLDVVKPRLNGSPETKTDTETGNAGKSSGHNDQLTEAAKLRMLEDKINAEGYDLPMMIEENPYFKTSITPKKSYKFGLLTIGSRGDVQPYIALGKGLVREGHKVTIITHAEFGEWIESYGLGFIEIAGNPAALMSLMVQHGSMNVGLLRDASSQFRGWIKDLLDTSWSACQGLDILIESPSAMAGIHIAEALKIPYFRAFTMPWTRTRSYPHAFIVPDQKRGGNYNYFTHVLFENIFWKGIGGQINKWRVEKLGLEKTNLYMMQQNKVPFLYSLSPSIFPPSVDFSEWVKVTGYWFLDSKDDYSPPVELSEFIQRARALNKKLVYIGFGSIVINDPKEMTRAVVDAILDADVFCILNKGWSDRLDNDNKTNAEPELFPDCIYNSGSVPHDWLFPKVDAAVHHGGSGTTGATLRAGLPTVIKPFFGDQFFFAGRIEDIGAGISLKKLNSKSLSRALKEVTTNSRIINKAKQIQQEISKEDGVSVAISCIYAELAYARSLVVAKAKGTQSDAKESSSTEENTWFLV

SEQ ID NO: 7764 - protein, 1713 aa, Lodderomyces elongisporus
MPLRDKVHLNFLSPVHSILGHLSGSTVVSEDEDATEDERDHNDDTIVHHNSGEEEQQQQQQQHRHGEKGHNTHDGQSINPKSKPDNDRAATPVQEARSEPLTKRSSTDDEEDTARPCGDASGADFFSSFINNTSLCSGFGSLNNLRKLNFEDFLQGKKNEDLSHDNLEEHKHPNLRKLREKWDDMKPDSITLPVSHKRSGSDYEHKAHPVYAQLKRKEEQEQEQGGKGSNTTTDDEMTSGDDADEDGEDDQEEEEEEEEEEEEEEEKFLAKRLTPSHSKTSLIQTLPSDSPHPTPTSSKIAATTRTKSTKTATATTEAATATTEAAAATSSSLSTSPTKTLSNEDASKTTSTSVISNITSYSTIDSDFSELKVNEKSEKEKSEKEIKIEKHRIDDEARNRVEKQILDGDEQIPSEENLTSLQKSVIQNLDPHSIREGVLIKVRQPHTDQEDHQKNDNKLTESKKRLRFLIAEKLQRTFHLKDDDIFYGNYSSWLVKDVLLQGHMYLTKDALLYFAFLPKRYTIDATAEVNNMEDSSNIIMKGNLGMKTGKLGDTTFVTPVTHKYWTILRPETMSIYSSSTDLYFPITVIDMRTCLYAEIADKEKYREAQLTTPGSRSANVASSGLNSPPSVTDTASELRKMLDEDVGATEDSVEVKSTNVWIKLVTRKKTYRFQCDNLYSARQWCSNLTKTIFQLNNANLSGEVLVKIPIANIVDFRKKTLFDEVDDDDIDPESNDIPLSLSIKYHTNHVVEKRKRDKIKDKLKNENDDVAEIFFLFPKNGTELFNAFDKIMQRPTSSNRNESETSSKIFASLKRDKVELDTSISTLTPSSNFLVKAVIESNMPEPTPRTSEESALKRLGKSIARPRAFTKTSNTQNSIDLVTTDSLSDSSQLSLPIALSEKSLKKLEITFETTMKDFKDATKRYEDKGQLLAAIDDIPLPSNEQNIDEKRNHSRLRKQIKSFSTVGAKLSANPLHYRIKDKYFVQSEHEREVASKNFQKHFSLFNSQLVSSYYCHVLRTLPVYGKLYVSDHEVCFRSLLPGVSTTMIIPMLDIAEITSDDTKLSYAGATIIVQGVDEMTIEFSSSKSRDDFRETCLEILAKLHENEGFRPQPHQWGSNYNIELAKTRMEYTDSERRRLDKDTHDDKRELHLAKQRVALSRIKMFEDRLNAASGLEVPIVLEDSPFFKTEMRPSTSYNITLLTIGSRGDVQPYIALGKGLQKEGHKVTIATHSEFKEWIEKYHIGFREIAGDPGELMSFMVGHSAMSVSFLKDAQAKFKDWIKQLLSSSWKACQGADILIESPSAMAGIHIAEALAIPYFRAFTMPWTRTRAYPQAFFVPEQKKGGSYNYLTHVIFENIFWKGTQGQINRWRVNELDLPKTNLFRLQQTKVPFLYNVSPSVMPPATDFPSWVKVTGYWFLDEGGSDYEPPKELLEFMDQAVADDKKIVYIGFGSIVVDDSASLTKAIVDAVIDADVRCILNKGWSDRMGNKDKNKIEVELPPEVYSSGSIPHDWLFPKVDAAVHHGGSGTTGATLKAGCPSIIKPFFGDQFFYATRIEDMGVGIALRKLTKKSLASALVQVTEDLRIVEKAKKVSLQINHEFGVLAAIESIYTELEYSRNLIAAKDIHNENYKRHHPDFKAQSEPATDSEEESEYGSDKDDDDDTDEEEGEGSSMDEVDDVDAEDAEDADDYKEAREEADETTDDEVHHKKRG

SEQ ID NO: 7765 - protein, 1426 aa, Trametes cinnabarina
MAHTPSTGSPPPTPGSPPTTATSPVAESKHTHTASKGSILQRALEKTRNAPLLSQSQPALPQPSHKRMFSLTRGKGKDRQTNEEHPPTSQSQVLPSPHRAPSKERRRHAAGGDDDSPFITPSSPSLHASRPERPLGFGFQSLHAGTQTFIQALQAVPWAEDQDNDDEFLNHDSTPLSAESDDEDQHVNRLTSSIHAIYRPVARSRRVDTHVSAHALAGTQPLPTVADTDESGVSDEPAISDEDMEGDFETHSPGHVIDARHTGRSSPEPIPGLDTSASDIPDLYRTRERVTSRSGNMSTVRQNRRPQLAEKLRDIFELKDINEVVAEMPCWLLRSVLLQGYMYLTDAYICFFAHLPTKEDQVLKSGSLMKKAQRTKRWIRHWFVLKNDVLSWYQSPADPYFPHGVVDLRYAISCEPVNEKDIRLRTNQKSIRLSADSGKSRDEWIKAIRKVMLKATNMGDSIKIAIPYPAVVDVERSNAMDFSETIEIKVQDRSSDLALDSYFFAYFTDLSIALEQIRDAVRTYRAEPSFQHAPTVVDTTSARSPVAKTGEHPPITPIAGHRPNSPPGFKLTSFLRPLQETLPIVRSASAPGPATDEAKSEEFTHISKRAGSSFVPVATTVEATSPTAGEPPGRPDLLRASTSSLTPTPSVADHTYPPSVSGSSADMRASPSPSTATPAHSNSWSVGMPSWLRLPSRSLFGVSSVPGVRPIVEHASTLPAVHAMPAVTELVSSRASTASRPTTIGSGSGEFGFFSILETPDTMVDSQTIDKFRQEFAFDDKEHLLGMFSGYLYRLLPVYGRLYVSNNYLCFKSSGPLTMRTRMILPLKDILATEKQKSFHFGHHGLVVIVRGHEELFLEFADEDRRDAFASVVQRQLEDVQERTTSGESRSSSDTRPEALILEEFGPRNPLNLSDSQTSSRESAAAHMFTSQSSTFLSFKPDRPLHFTFLTIGSRGDVQPYIALAKGLMADGHRVRIATHGEFKEWVESHGIEFGYVGGDPAELMRICVENGTFTFRGWIDDLLKTSWEACQGTDVLIESPSAMGGYHIAEALKIPYFRAFTMTWSRTRAYPHAFAVPEHKMGGNYNYMTYVLFDQVFWRGTAGQINRWRKNTLGLPSTSLDRMEPHKIPFLYNFSPVVVPPPLDWPEWIRVTGYWFLDDADVGSKKWEAPQDLLDFMAEARKAKKKIVYIGFGSIVVPDPKAMTRCVIDAIVESGVYAIMSKGWSDRLVKNKPAETEPEEPLPKQIYPISSIPHDWLFKQIDAACHHGGAGTTGASLRAGIPTIIKPFFGDQFFWADRVEALGVGAAVRKLTVDSLAQALREATTNEKQIERARAVGQRIRAENGVATAIEAIYRDMEYARSLIKGAAHRNIHEQLFDAEHATIRDYSSTAPLEQSSPSGSIAGPASDWSVISDSDEPLHDSCEP

SEQ ID NO: 7766 - protein, 1300 aa, Lachancea mirantina
MIAYSLVRLASVVKRSFIYVVLYAINKSGFCETLSHLRILWQGVYMITGKIDTVFFKEFCRITCSSYNLNELSLMVFDQSTKNSEEVDFSEGIDDTGSMPARGNEEPNPQVRPLRQSMGSLNIKDDLSPQSDNFLEDELGRDQEDDVARPCGMAKSIVGLLTTASVYAGMGGIDEGQIITEVEDDRKASSGDGLKGDNRQEDDDELAGSMSLSEDDTLFELAIVPTFAGHSNATDGPRSRHSKIYKMLFEKFELDPNVDQMLCSYSCWLLRDVLIQGHIILTECNLLFFAFLPKHDGKTKMSGNLSIVLSIGLGKKRISRYWAVLKDHTLSFFGSPKDLYFPVMTIDLRYAQKVDLCRQDGSPTTEFKIVLENKVFKFKADSDYACRSWCNGLRKQIFAVQNAQDDSLSIKIPLENIVDIDKQKTVADSFTLRIRVLESTDSYAVDDYFLMFLNNSGALLKTAVDKQLANLEMSGSNINFGRNLLPQPDSLESPFTFKDDDRSEAGRGRTIESRRSIFKQVLSPCSRKRDHTQDTEQSPSRSPLKVKERIRSMTDSFKGKQLGKSCIEEDMDVQYFPIEKDSDKSSDEAFPEVGNSMNSESEEAENELDNEAKEEPHFKLINWTPRPIKHMGNMWGAHPVHYLVQNLTLFPEDDKYIAGAKESQTANSRFREHFSLDENESLIAAYYTYLNKNIPIYGKLYVGKSKVCFRSLIPGTKTKMILPIEDMENCYKERGFRFGYFGLVLVIQGHEELFFEFSLRSSRDDAEFIMLKRLDSKISGVKKSVMTLSAEDVLTDQLTKDRALSRDGISKEAKLKLFEDKINAEGYDLPLMIEDNPYYKTSITPKKAYKFGLLTIGSRGDVQPYIALGKGLQKEGHKVTIITHAEFGSWIQSHGIAFREIAGNPAELMALMVQHGSMNVGMLRKASTHFRGWIQELLDTAWEACQNIDILIESPSAMAGIHIAEALNLPYFRAFTMPWTRTRAYPHAFIVPDQKRGGNYNYLTHVLFENIFWKGISGQVNKWRVETLGLEKTNLDLMQQNKVPFLYNISPSIFPPSVDFSEWVKVTGYWFLDEKIDFKVSDELRNFISEARTLGKKLVYIGFGSIVVTDPREMTKAVVDAVVSADVYCILNKGWSERLSPDQAHKVEVGLPACVFNSGSIPHDWLFPQIDAAVHHGGSGTTGAALRAGLPSVIKPFFGDQFFFAGRVEDIGAGISLKKLNSKSLGRALKEVTTNSRLIGKAQQIQKEISNQKGVDTAIGCIYSELEYARSLTTNKANEAKRVLKVTSSPLDEEGSWLMI

SEQ ID NO: 7767 - protein, 1321 aa, Paxillus involutus
MRAGTQTLIQALQALPWVDDPDNEDDATSPINPHMDSDSDDDEQTGPHIASSIHAIYRPVARSRRTETSHSILSGKILPPQKEFQDAVDVERDMNMTSDDDVDADDFEATTPRPADSQKYPLETPIPPPTTAQLGPALRRRAPSRAGSMTTVKLTRRVRLAEKLKDIFQLEAINEVLAEMPCWLFRSVLLQGYMYLTNSHLCFFAHMPSREDQVLKSGTLSKKATRTKRWIKHWFVLKNDTLSWYQSSSDPYFLNGIVDLRYAISCDPAGEREIRLRTNQKNLYLAADSVPSREEWVKAIRKVIFKAQNMGDTVKIAIPYSVILDVEKSSAIDFSETIEVKVFDKEEHYSVDSYFFAYFHDIQNALEHIRDAARIHRTFDPSLPQALLDTTATRSPVSAVQGMDRTRSLPSPDAKSSSSFRLSSFLRPFQDSLPSTLSRMYSAPELPEGAEDFTHISKRGGTSFVPVTSSPMTSSPDSGNITPSSAIGLSTNSPSRNHTYPPSTSAGDLTPASSLSKGLASGVPWNVGVPSWWKIPRKGLNISTSNSAVASTYPVSQCTGGVSEVYSTHQSPSSGQGSAAPGELGYSVLETSEAAVDPEMAEKFKVAFAFDDKETLLGYFSGYLYRPLPIPGRLCVSPNYFCFKSTGPLSTKTKMILPIRDILTVEKTKATRFGHHGLTVVIKGHEELFFEFGFEDRRRAFVSILERQMEYFRKRSKAGEAPALSQGKRDALVLEEFEPRNSLSSDNDPAPLSEALSESLPAVMFTSASSTFLTFKPKEPLHFTFLTIGSRGDVQPYISLAKGLMADGHRVKIATHGEFKVWIESHGIEYGYVGGDPAELMRICVENGTFTVSFLKEGLLKFRGWLDDLLKTSWEACQGTDVLVESPSAMGGYHIAEALRIPYFRAFTMTWTRTRAYPHAFAVPEHKMGGGYNYMTYVMFDQVFWRAISGQINRWRRNVLHLDNTSLDRMEPHKIPFLYNFSPAVVPPPLDWPEWIRVTGYWFLNDADVGAKKWTPPPDLLPFIDSAHQAGKKVVYIGFGSIVVPDPKTMTRCVVEAVVQSGVYAILSKGWSDRLQTQTAETPQAEEPLPKQIYSISSIPHDWLFQRIDAACHHGGAGTTGATLRAGIPTIIKPFFGDQFFWADRVEALGIGTGVRKLTVDTLKEALVSATTDQKQIDRAKLVGEQIRSENGVATAIEAIYRDLDYARSLIRQPANGSTDAAEGSNATKEEQSIDFSTSTLDRSGSRSRYDSFGSHSEDWSVISDGEDRRSSFGSRKSEGKLDRSLTLKRNSLAAAVMSVLPDSLTSATHRHTSSASSTQP

SEQ ID NO: 7768 - protein, 1092 aa, Aureobasidium namibiae
LKDIFNFDEAEKVVAKYPCWYLQSVLLQGYIYITQRHICFYAYLQKKTGVTIKSGYLTKRGQRNPRYKKYWFVLKGDVLSYYKDPSTPFSPRDVIDLRYGVSADITPTQAQDKEIASFSVVTDAKTYHFKAETASSATEWVKQIQKVIFRSRNNSDSVKICLPVDNVVDIEESNFPDFADTIKIRVIDNDETFAVDEYFFSFFGFGEEALRVLRSLTQETSAQRNVTATLSPASGLTSRSARSSSELERSTLDLTHEREESTSSPITKWRSGQKQKQWDQFPRDASESNVSSSDQGNDSEMSESATGTDASGSHILSGSVMFHKPTIGKHHADNVASHNANTQTDVPFAPAKRAGKEPGANTLTKNSPDTQAQDMQQSDSSTLGGLMKVGAVPIQRASGFLYNSGKRVSGLFGGTPSEYYDKFSGMIAGGKKHYAEADELQPGEEVQDSEDEMTVREAEKSFRSHFALPDSEKLVATFFGFFHRVLPLYGKLYVGSTRLCFRSFMPGNWTKLVVPFKDIMDVDKERGFRFGYSGMVIVIRGHEEIFFEFGSQDLRDDCTVTLLRSLDSMEPFQESVLLTEEEKKDAEAAAAENLLLQEARQGDRGDHDSSAVSFDDPAASVLDFKPEESLRITCLTIGSRGDVQPYIALCKGLLAEGHRPKIASHAEFGDWVRSHGIDFAPVEGNPAELMALCVDHGMFTPSFLYETNQKFWPFVKGLLKTAWAACQDSDLLIESPSAMAGIHIAEALGIPYFRAFTMPWTRTRAYPHAFGMQNSRMGGAYNYMTYVIFENIFWKATSSTINRWRKEDLGLKATSMEKMQQDKVPFFYNFSPSVVVPPLDFGEWIRVTGYWFLDEADNFTPQKELLDFIKKARTDKAKLVYIGFGSVVVPDPKKLTLDIIAAVKKADVRCILSKGWSDRMDKKDAKALEVPLPDFMFQIASAPHDWLFRQVDAAVHHGGAGTTGASLRAGIPTIIKPFFGDQFFFGSKVQDLGVGQKVLTVTENALGKAIWIATHDSRMIEKARVLGEQIRSQDGVGTAIKAIYRDMEYAKTLVQQRVARAAQADTDAEDEEEVEVEDSWTLVENDSDPDAT

SEQ ID NO: 7769 - protein, 1467 aa, Histoplasma capsulatum
MPPDDESRTARSSSSSKPHLASTYRLPQSHIPDRLRMGDDEHEDMTAPPAGTAGRGGRFPYMHQSVFSMIAAASSKNDFHSRFDESSDAEDEDADVARLPKDRFLSNDGVDGRRDGGASTSHVLNIAKRDKSSVPNAAEDRGRPHHRKRLSENKFLKSLAKLPHRGKGKVPAPEPEPDLDPTVTSEPSSAKAVRLVAATEAPVLSRMLDAQSRFGESEPLLNPTEPPGKTCCQRKELSPSSLLSARLMDIFGFDRPEKVISEYQCWLLQSVLLQGYMYITEKHISFYAYLPKKPHTIIKSGYLSKRGRQNPKYNRYWVALKEDVLSYYMDPSNLYFPSGHVDLRYGISANLAEQKGKDKDTDNNVKDFTITTNNRIYQFRADSATSAREWVKTLQKVIFRSHNDGDSVKISLPIENVIDIEENPVIDFAHTFKIRVVESGESYAIDEHIQQAMLVPDGGHISGCRRSHSVDVISHPSTHETTLLAEAVKATLRPLSPLDSQYGSPKQSQDLPRSHFRTFSRGRRQHSRECSEAGFEQKRSDSTNRASVGDNQDERSAGGKLQNSSDSFVQSLEHATESSAILQSTSGTVESASQILNRSDVFRSPTIHRLQNSLPGSGEAPRRHSEDTARFPPTSADLLPLRTQTTQSLMKQAQQDAGSDSEHDLQHRSVAPSASSPTLQELMKAGSYPLQRAAGFAGYLRNRSKHMSNLLATESMGYFEKVSGMWIGGKRHYGDGETILSDDKMVDPEDEEQGCEHGDRFRTHFALPPSEKLQATYFAYLHRVIPLYGKLYISNRKFCFRSLLPGTRTKMILPLKDIENVEKEKGFRFGYHGLVVIISGHEELFFEFNTADARDDCAVTLHQNLESIRYLVESGLLAQQEREEADAAMAEHQMLEEARLEGMDEQQSSQTLSTSMPLSSTSSPILFDDPRVSIVNFKPQEALRITCLTIGSRGDVQPYIALCKGLLAEGHIPKIATHREFEPWIRSHGIDFAPVEGDPAELMRICVENGMFTYSFLKEASSKFRGWIDDLLSSAWTSCQNSDILIESPSAMAGIHIAEALGIPYFRAFTMPWTRTRAYPHAFAVPEHKMGGAYNYITYVMFDNVFWKAIAGQVNRWRKRELGLRSTNLDKMQPNKVPFLYNFSPSVVPPPLDFCDWIRVTGYWFLDEGANWQPPVELENFIKQARADEKKIVYIGFGSIVVSDPAALTKTVVDSVLRADVRCILSKGWSDRLGDPSSAKAEIPLPPEIHQIKSAPHDWLFSQIDAAAHHGGAGTTGASLRAGIPTIIKPFFGDQFFFGSRVEDLGVGICMKRLNVSVFSRALWEATHSERIIVKAKTLGEQIRKEDGVATAIQAIYRDLEYAKTLVRQRSPTTSAPQTAIYAVSNEESAAMISSETSPDDDGDGEDDADADAAMEDSWTFVGDETETDVTKKTRARERDYDIRLDNVATAGVINGSGGYGSDSGKG

SEQ ID NO: 7770 - protein, 537 aa, Rhizoctonia solani
MIASRSSEGVSAQRDPVSPENAAFGSTSILSEASAHTYPPSPSHQVPPSTHSNRTSISSNWSVPGYNWLRGKGVFSTPSSIDWGSRSTEGNVSEVISSPRLDQSELSVSSEGHNLGYSMLEAADESKIAHAALQEKFRSTFALDEKEELLECIPGSLFRVLPVYGRLYVSTNYFCFRSSQPLTRTRMMIPIRDILSTEKQKPFRFGQHGLVVVIKGHEELFFEFGSSERRDTCRSGLDRQKEALQKQALSPVSPTPTQGKRDALILEELEPSMLISDDDPRPAPEVLASDAPVMFASTSSTLLTFKPEKPMHFTCLTIGSRGDVQPYIALCKGLQADGHKVRIATHKEFQPWVEGHGIEFALVGGDPAELMRICVENGMFTVSFLREGVQKFRGWIDDLLETSWLACQGTDVLIESPSAMAGIHIAEALKIPYFRAFTMPWTRTRAYPHAFAVPERKMGGSYNYMSYVMFDQVFWRGISGQVNRWRRHTLRLPSTNLDKLEQHKVPFLYNFSPTVVPPPLDWYEWIRVTGRSMNMLS

SEQ ID NO: 7771 - protein, 1258 aa, Heliocybe sulcata
MTSSLHTIHRPIDRSRRVESTALRNVFTVSPEESDDDKEQEMAANSEPEDADFEVETPRVDQTPPGFSSIVASSHKSIRGRAEGHQSATARSGSMATVRLQRRARLADKLKDVFDLEGIEEVVAEIPCWLLRSILLQGYMFLTNSHLCFFAHMPARENQTLKSGSLNKKAQRTKRWIKHWFILKNDVLSWYQSSSDPYFPHGVVDLRYAISCEPVKDRDFRIRTNQKTVLLAADSTSSRNEWVKAVRKVMFKAQNNGDTVKIAIPYSAILDVEKSSALDFSETIEVKVIDKDDSAIDSYFFAYFHDLGTALEQIRDVIRNYRTVTQGSSPQPIMDTTIPRPVNIPSNPADQTAAIERTLSLPGADHLSRAYSAFRMPSVWPLSRGTQSEQHGTADNEEFTHISKRKSGSSFVPFTTSPKGEKSQLAPADLGEPSISSEGSSRISSSLSSDHTYPPHPSPSDSYNPLGSDNGGGRWVVSTWLKVPSRSVFTFSSSGSRPSIEHSTTLPTMPTSATSESFSHPSSPHRSSDLGFSILDQPGSAVDPDMQENFRSYFAFDERETLLGYFPGYIYRLLPQPGRLYISTNYFCFKSTGPLSTRLRMILPLRDILAAQKSKAFHFSHYGLILVVKGHEELFFEFSHEDRRTAFISLLENQLEDVQNRQASRSPQQRDPLILEGFDSKTSLVQSMPDAPPPQESLDESVPAAMFTSSSSTFLTFKPKESLHFTFLTIGSRGDVQPYIALAKGLMADGHRVRIATHGEFREWIEAQGIQFSCVGGDPAELMRICVENGTFTVAFLKEGLTKFRGWLDDLLKTSWEACQGTDVLIESPSAMAGYHIAEALGIPYFRAFTMTWTRTRAYPHAFAVPERKMGGSYNYMSYVLFDQVFWRAISGQINRWRRNVLGIRGTNLDKMEPHKIPFLYNFSPTVVPPPLDWPDWIRITGYWFLDDAEVGSKKWTPPTDLVDFIDTAHAAGKKVVYIGFGSIVVSNPKAMTRCVIDAVVKSGVYAILSKGWSDRLEVKSGDASEIEEPLPKQIYPITSLPHDWLFQRIDAACHHGGAGTTGASLRAGLPTIIHPFFGDQFFWADRVEALGIGSGVRHLSVDALTAAFVAATTDEKQIARARTVGEKLRSENGVAVAIEAIYRDLERARSLIKNPHDNPDGENATIRDAVNVNASSRSTPERPSPVESSTESIGASEDWSVISDGGTSDGGHSRPDMRRRSSLGAAVHSVMHKSSRSSRANSRASSPPVPSYPPRSR

SEQ ID NO: 7772 - protein, 512 aa, Cephalotus follicularis
FNQLHSTVTASTTKWKRRKHRGRHPLLPSWPSAIAAAFACDQTQYHVLLITHSAHQNLSSHLAEKHVAYFPISSLPVVSTRDDHGSLKSEFSLQKRIVTREHRRECYAAVESIFGNGPCMEGDFIVINFFALEGWSLAELFCIRCIVAAPYVVPYSAPSSFDRHFRKEFPQLYRYFQEAPDHKVSWKDVIHWMWPLFTDNWGPWRSEDLNLSPCPFTDPVTSLPTWHNRQASPLLLYGFSQEVVECPDYWPSNVRVCGFWFLPIDWQYSCKNCGEISVLSPTRHLRKKEELCSAHIELESFLKAPASTAPVFVGLNSVGSMGFLKNPQAFLRVLQTVLQITSYRFILFTAGYEPLDTAVRVIATESCSLSYQKHSLFNSRLFCFSGMMPYNWLLQRCVAAIHHGGSGSTAAALNAGIPQIVCPFILDQFYWAERMFWLGVAPEPLKKSYLVPENTDPKSITEAATVLSKSLHDALSPEVRARALEIAKRISLEDGVLEAVNILKEEIRCKKD

SEQ ID NO: 7773 - protein, 1044 aa, Batrachochytrium dendrobatidis
LTVAEKIQTVFELPETEPYRGEFACWLVRSVLLKGYMYLTSKHICFYASLYKSTRDIKSGFLKKRTTAKLYNTNWFVLKGNTFYAYGNSTELYYPLSTISMKSIVSVCVSKLSKTGFRIRTTSKKYAFEADTETLCNEWVAALRAAVFRSHNMGDDVRVVFPLSSISEISIAKSIGLDDSLRIKIVDSEFLISEEYYFAYFNDANRACDTLIALWESVRNEAKHNVVRKRVSLYDTTALTGLPSQPLDSHAKLGKQTNGFLGTTNDDMPATSSSSLLQSGTSLPALFRKSSVASQLATKAENGIAIGSVSNSPLSRPSLHHRAQTDMNLFDEDISTSYNQADSGSNGGLNLPSRHHKSSHTNLEKQQSSLTNINGLLSSGAVESLDKETPPFLSTLTPAKPDSSIRRNWWGHRKTISDGADAFGPAFSTSFNVLSKLDPGATTASQQQKILTFHKDFSVPETEILHATYSCYLDRVILRLGKIYISDHFLCFKSKVVGVRAKVMVPLSEIINIDISRKYTSLYYALVITTHTQEEIKFDFQSFESRKKIYNVLHKLLYTSSNKVEPNNDELSAHEQKAALLKDISLSETHVKSVFSQYEIAYIPPILDPERPIKLSEKMHITCLTIGTRGDVQPYIALCKAFMADGHTCRLATHLEYQDWIEGFGIEFRPVMGNPAELMQLCVDNGLFTVSFIREAMGKFRGWVDELLLSCWDAVQGTDLLIESPTAMGGIHCAEKMQIPYFSAFPMPWTRTKIYPHPFAVPEYHLGYGYNLMTHALIEHIFQKGVAPQVNRWRRQSLDMPTMNLGLLSEHKMPFLYSFSPSVVPPPPDWQDWIHTCGYWFLDNPEHGWEAPASLTKFMENGAKPIYIGFGSIVVPDPDALTRTIIEAVKKAGVRAILSKGWSVRLAKDSATAGQTETPIEYPDCIYPLDKVPHDWLFPLMAGVVHHGGAGTTAAGIRAGAPTLIYPFFGDQYFWADRVQDLGVGLSIRKLTVDKLASALVTLTTDHKMRERSALLGERVRCESGAANAVQYVYRDLEFAKQRI

SEQ ID NO: 7774 - protein, 553 aa, Melampsora larici-populina
MFQSTTSDFLNFKPNRTLHITCLTIGSRGDVQPYIALCNELAKDGHRTRIASHGEYKDWIEGYGIEFVEIGGDPAELMKICVDNGMFTLSFLKEGLTKFRGWLDDLLSSAYEACQGTDLLIESPSTMAGIHVAEALGIPYFRAFTMPWTRTRTYPHAFAVPDHRMGGGYNYMTYTVFDQVFWRAISGQVNRWRKEKLGLRSTTFDKMECHKVPFLYNFSPSIVPMPIDWFEWVHITGYWFLDEGQGEDDKKIDQELIKFLNRSREMGKKIVYIGFGSIVVPDPIGLSKMVIEAVEKSGVHAVVSKGWSDRMSKKDNQPQKENQTKEDDELINESEQIFNLQSVPHDWLFPKIDAVCHHGGAGTTGASLRAGVPTIIRPFFGDQYFWADRVEKLGIGLGLKKMNVKSLCKALEIGTKDEVMIKKAKMIGELIRSESGVSKAVESIYRDLEYAKSLIKKNKTKELGGEEEDQENQEEEEENQMESSDQCEIEESGSGETEESQLEELDGCEGLEGDDEEDLEEGEGAEGEGEEEDNSSWDHLSQPSMSPFFGPLS

SEQ ID NO: 7775 - protein, 701 aa, Withania somnifera
MDSNGHNGTTKSLQDLGDGVETTGRLGKSLDRTSDVDSSVQLDKKSLDKQLPRALDQSTSHLEVPDNSDERCDAGFSDELDGWRTSSSSLVDTRSSDEHSDDCLTPEMKYQRTHPLQPSLVLESPESNGWSSSVPPRARRGLEHCITAPVTTHRSLFLEGQDMAFSRSLTERRDSPGHNLILDRLSEREKQKLIVEMVRIQRDGTVEVDLTKNTPVASELLELQSVEGPIPTVDRIITDFNKSVPKLRISVLVVGTRGDVQPFLAMAKRLQAFGHHVRLATHSNFRDFVKSAGIDFYPLGGDPRILAGYMARNKGLIPSGPGELSIQRKQITTIIESLLPACTEPDTETGEPFRAQAIIANPPAYGHAHVAEALGVPLHIFFTMPWTPTYDFPHPLARVSQTAAYWLSYIVVDLLIWWGIRNYINEFRKKKLNLPPIAYFSTYNGSISHFPTGYIWSPHVVPKPKDWGPLVDVIGYCFLNLGNNYQPPEEFIKWIQNGPKPVYIGFGSMPLEDSKKTTDLILEALKNTGQRGILDRGWGDLGTFQEIPENVFLLAECPHDWLFPQCSAVVHHGGAGTTAAGLRAGCPTTIVPFFGDQFFWGDRIYEKGLGPAPIPISKLSVEGLSDAITFMLQPDVKSRAMELSVLLENEDGVAGAVDAFHRHLPSEIPLPTPPPEECDGPNLLQWLFTRIGKICCLPCGS

SEQ ID NO: 7776 - protein, 1294 aa, Lachancea dasiensis
MARKDQPDVRVYNGASSAAPESEQRPQQRRWIRSLSPVGKLYRSSAGLVHLRNRSLSVRTSNSAVSDSQESETSNSHVSKEHDHDLARPCGMAKSIVGLLTTASVYAGMGDLEQAHQTGEEEEGKEDDEEEELEDDDEEEVEELEDDDDVEGGGGEEEEEEEEGEDEQEERDNYSVFLDNNSRKKPQDGKGESVPGSPLLALQAADEADHTSDSLRSSSDLDSLANTVTHFSKKDSLFELSVVSNNDANSLSSSSSRSRRSKIYKKLLSKFNLSEDEDQFVTKYSCWLLKDLLIQGHIVLTTRHLLFFAFLPKSTGTPKMSGNLSIISGVGLSGRWTRYWSVLKDHTLSLYNSPRDLYFPLLTIDLRYANRIELAKHDEEATGHFKIHTEAKVYKFRADSGYASRSWCSALKKQLFATQNSDNDSISVKIPLSNIIDIDEQTVVAQSVTMRIRVLETPQSFAVDDYFFMFLSKKDANLKEMINRLLLDVGQSHPKKLEAERTLLSNDISLNTDLSLGREIRQNKTGLGSGKIIKRVLSPVTRVHRPSFSMSIPFNSRLPQRTKESHFSKDEEVNAPSGQGSTNKNSDLSSPEHIEAPDDGLSESDSYFGTVEDNKGRIMSLASWTPRPIKNMGSMWGAHPMHYRYNDEEMFPDDDQYLANSKEQILASQRFRSHFSLRQDEALTAAYYAHLNKNIPVYGKLYLGSSVLCFRSLLPGTKTKMILPVSDVENCYKERGFRFGYFGLVVVIHGHEELFFEFSLQSSRDDAECLILKQLDSTKAQTGGLGDVGKLTNNFTATTLSAEQQVSEAAKLRLFEDKISAEGFDVPVMIEESPFNKTTLTPKKSYRFGLLTIGSRGDVQPYIALGKGLLAEGHRVTIISHGEFQDWVTSYGIDFREIAGNPAELMSLMVQHGSMNVGLLREASSHFRGWITKLLETAWLACQNLDILIESPSAMAGIHIAEALRIPYFRAFTMPWTRTRAYPHAFIVPDQKRGGNYNFFTHVLFENIFWKGIGGQVNKWRTETLGLGKTNLMLMQQNKVPFLYCVSPTIFPPSVDFSEWVKVTGYWFLEGEEDYVPPKALVDFIAKARSSGKKLVYIGFGSIVISDPKKMTKAIVDAILEADVFCILNKGWSDRLGGDDKSDTEALPSCIYSCGSVPHDWLFPLVDAAVHHGGSGTTGAALKAGLPTVVKPFFGDQFFYASRVEDIGAGISLKKLNSKTLSRALKEVTSNSRIVHKAQQIKHDIFRENGVGSAINCIYSELEYARSLVLEKNKDMKKTTKVGSSPEENSWLLV

SEQ ID NO: 7777 - protein, 1801 aa, Ophiostoma piceae
MQPPIEPAPTASPAVTPAATPAATPSPITTAAASAAPASASPNPTATPTPPAAASRAPLSPLAASTSQLPQLPRSSTSSAPPAHPAHPAPLTTTPLPASFKHTRKPSRLSALSTILPAISTNTASLPVSPRSDDEGLSQSQNNRNRAKRFLKKRERVTSPRESRMEFPERLRRKDRGDNDEEVIRPNATTNNVFMGVNQSIFGLIAAAGSQVNFNDLGHSSDEDEDDDAGGDVVVARPPPRVASPLSTPDDDDALEAFVKPRRKARFGTDGTDEGKDKDDADKPKRHHFRNISQSSIFKRDKSDKSRDSKEDQDKRFDGKLLRSLPALPALKMKKRLSMRKSSASRSRTRDEHGEDGSQTPTERDDDSPTIQVTRDRSSSMRSIAPVMSRMLEAKAALATGSGSGRDDRGDRGDPTANKSSDTSTNSLTADEGYAYADAADNSNDDADADADAKATSALERKLMDIFEFDKPEQVVEEYPCWLLQSLLLQGYMYITSHHICFYAYLPKKANEVAKSGYLAKSGKRNPKYSRYWFRLKGDVLSYYRDPSNLYFPHGQIDLRYSISATVTPASGGGDGLHFQVVTNNRTFYFRADSAPSAKEWVKSLQRVIFRSHNDGDSVKISLPIDNIIDIEENPSLVEFTDTCKIRVIDNDETFAVDEYFFSFFEKGKDAIRILKILIDDAGKDDVRDGRDKDRLDVIRHSEDHMSHESGAASTGAVGPTSQLSAAPLSAVSATSPSVPGRAPRLDSVRATLQPGASSPRASGEFPRSSFDALRSSFTGGPAANSRKSLDLSQAIGGNAIRRSFSDRVGPRASTDRQRHSSSHYRSMPHGSSPVGHADKTDKTDKTDKSELGDSMQTSFSNLNASSSDDPSASQILNGSEVFKTSVDKSDKSDKPDKTDKKAKKDKEKRDKKEKRRSMGLPHAATTGQLNVGGCDMADGYPTDEAGLTHNLARLGSFPLQRAGAYADWLNRTSRRMSSLLATESMGYVEKVSGMWKGGRQHFDDGESGGELEGVPTDMENSSTLLQQPHPLTPGLPDAGADTIVSNEHFREHFALPDSEKLQATYFGHMMRVLPLYGKIYMSSRYFCFRSMLPGTRTKLILPLKDIENVNKEKGTRFRYAGLVVVIRGHEELFFDFFQNDMRDECALTLMRLVERARYLKEAAVPELEEDPDEKEVAEAALAERNALQEAREAAAAASAAASAAASTSASISGVSDSPIVSDKERERTEKTVLRQPTFTSEAPTILFDDPKASFLNFKPSEPMRITCLTIGSRGDVQPYIALGRGLVKEGHSVCIATHPEFESWIRSHGLDYARVEGDPGELMRICIENGTFTLQFLREANSKMRTWLDELLSSAWTACQGSDLLIESPSAMAGIHIAERLQIPYFRAFTMPWTRTRAYPHAFLMPEHKMGGAYNYFTYTMFEAVFWRATAAQINRWRKKTLGIRSTSLEKMQVNKVPFLYNFSPRVVPPPLDYSDWIRVTGYWFLDEAAAGSGVNDTTWTPPADLTAFIDKARADGKKIVYVGFGSIVVQDPAKMTQEVVDAVQRADVRCILSKGWSDRMAKGEGAGSAADEPAMPDEIFQIKSAPHDWLFAQIDAAAHHGGSGTTGASLRAGIPTIIRPFFGDQFFFGQRVEDLGVGLCLKKWGAASFAEALWEATNSARMIRKAAILGEQIREENGVDTAIQCIYRDMEYAKSVVKEKVAKSGQTVGGGSGTVGGLDESAEVLPANVSQAQDSAADDEYDDDVPEESWTFVGEDADPMQQSVILARPSQSQSQEGSRSQTPVAGYRSLSTRILGIAK

SEQ ID NO: 7778 - protein, 1225 aa, Eremothecium sinecaudum
MSTRGSKRRLKVPKTPAIPLKLIKVRALASSALLKISLKAPLGIKSYTLPPPFKVHKEERQTMIWTADEASTSPGDRDEDFASPHVLARSIAGLLTAASMYVGIEDIHRAEQIGTNEEESSAEPGDDNAEVKADEEVEEGSIFSGAPSFSGAQSRRSTLFELSIVPNTEMTSVQQSRGRNWTSRIMSKLKSKFNLQEDEQLVKEYSCWLLRDVLIQGHIYLTSKNLLFFAFLYKADGAARLTGNLSISTSSISISGKLTRYWAVLKDHTLSLYNSSTDLYFPVLTLDLRYVTKVQHCKQNGVETRKLSVVTDSRTYSFFTDNEHFARSWASAIKKQVFTTQNSDNDSMSIKIPLCNIVDLEDHAIMEKGMTLRIRTMESSETFALDDYFFMFFNNAGNQLTDIIKAQLADLEMLGSQVMIKYGSNSSPIELSGSSSPVQPVLESSFETRGRSDVKIKSRSFVTASRTPPPIGRGCVPSVTYPLSKSPSKVRNRFRTVTDSLKLTSPKIGKSEDSSASDVKGANTESTDGVHSNIDNNSSEQETFDTNRNKTVYWNPKPFITMRSMWNALPIHYAAEGLDLFAKDDELLMSDPVEAKAADKRFKEHFSLTDDESLIASYYTYLNRNMPWYGKVYLGKSVICFRSLLPGSKTKMILPLRDIENSYKEKGFRFGYFGLVIVIHGHEELFFEFALQRSRDDAEYLILKVIDTLRPLTVELAKDNDSIDQRFKNTHIQDPTNDGKLRLFEDKINSVGYDIPIMFESSPYFKTTITPKKIYTFGLLTIGSRGDVQPYIALGKGLMQEGHKVIIITHIEFGDWIKSHGIEFRSIAGDPTELMALMVQHGSMNVGLIRDATSKFRDWIRDLLTSSWEACNGIDVLIESPSAMAGIHVAEALQIPYFRAFTMPWTKTRSYPHAFIVPDQKRGGNYNYFTHVIFENIFWKGIHGQVNKWRVETLGLPKTNLEFLQQAKVPFLYNISPTIFPPSVDFSEWIKVTGYWFLNESSGYEPPQTLVDFIAEARANEKKIVYIGFGSIVVKDPAKMTAAVIEAVVKADVYCILNKGWSERLADPAATYLGVDLPPCIYNAGTVPHDWLFPQIDAAVHHGGSGTTGATMRAGLPSVIKPFFGDQYFYATRIEDIGAGVALKKLNANTLSRALKEVTTNSRIITKAKKIGLDISKEDGVATAISFIYSEMAYAKSLVKMKNHDNKQLSKDTKHIANDESWLML

SEQ ID NO: 7779 - protein, 1230 aa, Torulaspora delbrueckii
MNLATKGRKSGESSSHNISQESVGTGKLLTALIPQRRLSKSIASLKPGRNGKGRTASIGSDGEEMVRSDSDDTGGYDVAKSRFMMKSIADLLTTASVYAGMDDAQEADDLAQDLTQNDKDRRNEDDDLLGRQQKDSNDEVQADSEGGPVRLAATRKPTLFSFSVVPTEKMESAMGSDQAFKRKIIKKLLEHFKLDQNEELLKDYSAWLLKDVLVQGNLLVTSRHILFFAYLPKNPGTIKLSGNLNIRSTLRTSVRYWCILKDQTLSLYNSPTEVYFPVLTIDLSNTTSIHLEKRSSSDDPNTTFKVHNNGRTYVFNADTEYSARAWCNSLKKQQFAAQNTENDSVSVKIPLANIIDLDDQAIVKQALTVRIRALESAHSFAIDDFHFVFLDGSGFSLMDMVKKQLSALNTLGVRILFDNFSPGDDPNSSAKLEGGRKCIEDTKTQESSQTSFDMSSKEHASLIDNILHHTPGSLAAKDPEEKTWSRRLRSMSGSLFTKPSIFNGSDEDVVVEFYSRFPTQASDNASRSTLKDQFSDDDDKATESEHGHRKTKLTDLATKPFKNVAEMWNAHPIHYMNDYVPFSEDDPYLVKNKRKVHALHRFRRHFKLNNNEILISASFTHLVRNVPLYGKLYIANDVLCFRTLLPTVNTKMILPLNDVETCYKEKGFRFGYLGLVIVIRGHEELFLEFSTASARDDAEYVILKRLDDVKSKRRVPASVSANIVETDSNTAKLKFFEDKINAEGFDVPLLFDENPYFKTNIKPQRSYKIAMLTIGSRGDVQPYIALGKGLLKEGHQVTIITHSEFREFVTKHGIGFEPIAGDPAELMSLMVEHESMNVGLFRDASVRFRDWITALLDTSWAACKKLGLDMLIESPSAMAGIHIAEALDIPYFRAFTMPWTRTRAYPHAFIVPDQKRGGNYNYLTHVLFENLFWKGISGQVNKWRLESLGLDKTNLDMLQQNKVPFFYNISPTIFPPSVDFSEWIKVTGYWFLDEKTDYKPPQALVDFLSRARKLGKKLVYIGFGSIVVSNAKEMTKAIAKAVEDVDVYCVLNKGWSERLNDSSSKEIEVELPECIFNAGNVPHDWLFPQMDAAVHHGGSGTTGATLRAGLPTVVKPFFGDQFFYALRVEDIGAGLALKKLNSHSLTKALQQVTTNKRMADRALLIKNQIANEDGVRTAINCIYGELEYARSLVLARSKKEKITPYKEVQTSEPLANKASNNQADESWFFV

SEQ ID NO: 7780 - protein, 606 aa, Vigna angularis
MGHDELVTVDNVSGDELESTSSEKEENWSENLEQNSSEVNSTSSEVNSTLGVGPVGTESNLLVAADNGILFPKSMMEFWDSPRQDLIVDRLSECEKQKLLNLVKIQNDGTVDVDLEKGAPLVSELLKFQSFEESTTSASVVSESKISAPWLQIVMLVVGTRGDVQPFLAIAKKLQDYGHRVRLATHADFDTFVKSAGVDFYPLGGDPRALARYMVRNKGIIPSGPTEISIQRKQLKAIIDSLLPACIEPDLETGIPFRAQAIIANPTACGHTHIAEALGVPLHIFFTMPWTPTYEFSHPLARVPQSAGYWLSYIIVDVLIWWGIRGLINDFRKRKLKLAPIAYFSIYNGSINHLPTGYMWSPHVVPKPTDWGPLVDVVGYCFLNLGSKYQPQEDFVRWIQKGPKPLYFGFGSMPLDDPKRTTDVIVEALKDTGQRGIIDRGWGNLGNLAEVPENVFVLEECPHDWLFPQCSALVHHGGAGTTATGLKAGCPTTIVPFFGDQFFWGDRIYQRGLGPVPIPISQLSLENLTNAIKFMLQPEVKVQAMAIAKLIENEDGVTAAVDAFHRHLPPELPLPSPSPVVEDHANPLQWFFVQLAKLCTLPCGSV

SEQ ID NO: 7781 - protein, 2082 aa, Pseudogymnoascus sp.
MPAPSGDGNNLHKYFSSQTPVAAMVKKESEESAPAAKIEAPKDSKMSAFERKRLENIAANQAIMKDLSTTAKKIIPKTAAPKPPRSKTPRKREPPVKKEAARPTRTSSRIAGLEADGEGAKRKFEEEFQFAPDEAKAKKMRVAGDLNLSDIAVEGKKWTNDDTLLTSIMRGAQPYERTFDESDIKTTTDQELKFLREKMSGLELYKTWEPNDIKITPERIYSMGFHPTHDKPLIFAGDKIGNLGIFDASQEGEVDDDGDQTAEPVITAFKLHSRTITSLLFPTNHTEMYSGSYDSSIRKLDLQKQVAVEVYAPPSMDDDEAISAIDMNSNDPNLIYFSRLDGAFGRHDMRTKKDTDIWYVSEKKVGGFSLHPLHPHLIATASLDRTLKIWDLRKSTGKGDERQPGLLGEHTSRLSVSHAAWSSSGHVATSSYDDTIKIHSFTKAKAWGVGHDIKEEDMEPTAVIRHNNQTGRWVTILKAQWQQRPDDGIAKFVIGNMNRFVDIYTSEGEQLAQLGGDGISAVPAAAQFHPTRNWVAGGTASGKMCLWIRQPEGLIAIGTTPPTQIFTTTPASAVATRQNTRHIEVVIPLKRARIMIRSHDDIKKRVGRKLTKKRREDRRVTMEIPQRFEDGDDADEDCTAPKGQNGVINQSVFGMIAAAGSQVDFHSRFDGQESEDDEDDETTEPDDASKPSEDSSDPSTSKPATDERRSRHRLHRRNLSDNKLLRSLSQLGIKHRSKHAQLSTASSDPVTPEKIKYTERDHAALSPFKGPPIMSQMLEAKAAAVQRASFDSRRSDYISGQSDGADAEEGSPSDLAIQLKEIFEFESPEMVIDEYPCWLMKSVLLQGYMYITEKHICFYAYLPKKSNEIVKSGYLSKRGLKNPKYNRYWFSLQGDVLSYYTDPSDKYFPAGNIDLRYGISASVVDKEKTFFEVITNHRRYQFHADSIPSAKEWVKALQKIIFRSHNDGDSVKISLPIENVIDVEDSPVIEFAETCKIRVIDNDETYAIDEYFFSFFSFGKQALNVLRTLVSDSAAKQIPEDMLVPAQGTSGNNSPKAGSSRPSLTIATKESKPFLNPSRPTTSGLEDSVKATLTPLMSSPLHVHSPRASGEFSRTSFDINHQRSSSQTRPTRRSMEVSRLNLDGNGRNGSPSGDRRSFSRNRAAEKRNSEKQDSSDSYVHSMEESSAAAQSASEDATGSASQILRGSEGFFQPTIHRSASASRRRDDPLLPPTPTLPPHAATIDALERPKLTQADSGSSPSLQTLAKAGAYPLQRAAGFANYLNRHSKRMSTLLATESMGYVEKVSGMWKGGKKHYDEPLGHGLEDDTDDESVGQTEAAQQRFRAHFALPPTEKLQAAYFAYLHRVLPLYGKVYISNRSFCFRSLLPGSRTKLILPLKDVENVDKEKGFRFGYSGLVVVVKGHEELFFEFRQPDARDDCCVTLLQNLETIRFLKETGLLTQEEEESAAWAVAEHKALQEARHESRQHIHDVELPTTAEGASTETAPIMFDDPRASILNFKPTESLRITCLTIGSRGDVQPYIALCKGFIAEGHRPKIATHVEFKDWIEGHGIEFAPVGGDPAELMRICVENGMFTYSFLKEASTNFRGWIDDLLSSSWLACQNSDVLIESPSAMAGIHIAEALGIPYFRAFTMPWTRTRAYPHAFAVPEHKMGGAYNYITYVMFENVFWKAIAGQINRWRKKELSLPRTSLEKMQPNKVPFLYNFSPSVVVPPLDYSDWIRVTGYWFLDEGTDYKPPKEISDFIAKARADGKKLVYIGFGSIVVSDSAALTKTVVNSVLKADVRCILSKGWSDRLDKLGATEPEILPDEILQIKSAPHDWLFTQVDAVTHHGGSGTTGASLRAGKPTIIKPFFGDQFFYGSRVEDLGVGIYLRKLNVSVFARALWEATHSERMIIKANLLGEQIRSENGVDTAIQCIYRDMEYANSLIKRKTGSHHEGLAEDIEESWTFIGDDNDPELMSRIHAWDPRVVMAQAKEGELAKEVEGVELTDSPIPTSRSETPLPSEKEGGSNCASLTDERSNLPPTPGSRAYTLGPRHYKLPSHLSPTCFRRQPQANGGNNNG

SEQ ID NO: 7782 - protein, 420 aa, Starkeya novella
MRIAIHVLGTRGDVQPYLALSRGLRLRGHEVLLVAPAQFAGMAEAENLAFAPLPGDFLALLETPEARAVIGKSRAGFGAGFKLIGHYRHLARGLLDAEWEAARAFHPDAILFHPKALGAPHIAERLGVPLFLASPLPGFTPTAAFPTPLLPVRSLGPLNRASHALMIHGGNVLFSKTIRTWRAETFGSSGRSRRPPLAGTLYGYSPQVIPKPSDWGPDIAVCGYWFLDMPNWNPDTDLAGFLRAGEPPIYVGFGSMPGTDPEGLTRLVIEGLRRAGRRGLLATGGGALGRAEAGERIHFIAGAPHDRLFPLMHATLHHGGAGTTGAALRAGKPMAICPFLGDQPLWARRIEALGVGTRPLDKRRMTADDLATAFRSMDHPAMRTHAEALGIAIRSEDGIGTAVSFIEERLTRAKPGASAV

SEQ ID NO: 7783 - protein, 867 aa, Phialocephala scopiformis
MAQYQVYEMPSSLDALEGHELPSSRTSSETYLDSPPAYEAVAGQLAQEAAEVRDDGRITVDLNSRLARTLSKFMPKCPIYSAGEDRRGEKPAQEPKPISWNVKLNIVVQVVGSRGDVQPFIALGNELQKHGHRVRLATHNTFRNFVESHGLEFYPIGGDPEELMAYMVKNPGLIPSMKSLRQGDIQQKRAMVAQMLTGCWESCVEPDPISGIPFVADAIIANPPSFGHVHCAQALGIPVHLMFTMPWTNTRAFPHPLANLKNGGKDSKLGNYTSYSVVEWLTWQGLGDVINNWRETMDLEPVSSMDGPNLAAQLKVPFTYCWSPALVPKPIDWAPHVDVCGFFFREAPNYTPPPELDAFLRAGERPVYIGFGSIVIDDPIKMSNVIIEAVHKSGVRAIISRGWSKLDGPAMDNIYYLGDCPHEWLFQHVAAVVHHGGAGTTACGLLNGRPTTIVPFFGDQPFWGNMVAARRAGPKPIPHKTLNSQNLSEAISLCLTPEANAAAKDIASSMQQESGVRTAVQSFHDNLPFEKLSCDILVDQPASWAYKKKGKSLKLSKLAVEILRTNHKFDTKKLELYEPRPIHITTKYYDPVSGSTAAFIGWNIDVVEAAAGMVTKPYKEYKVGRTTTSTKSVTSETSSLRTRSSSSSTEVESLTTVSGITSPTSSRFSSSRKSVDVSSPPGFGCTAARMAGASAKSFGDLNVKGFKGLLVDIPLATAEGLRNVPALYGDKIRDHGTVTDWKSGAMAGGKAFMYGMGEGLTDIFVEPYKGGKKEGVVGVAKGVGKGTVTLLTKTGYGMLGLVAYPGQGIAKSIRTAVKSRTRKVIANVRHEEGQYLLKGPIGREINHAQVTAVFDHFMAAEGAAPRT

SEQ ID NO: 7784 - protein, 1599 aa, Meyerozyma guilliermondii
MADNEPAMATKQHNAELLPPTRTTSEPPLYKRLGNMVIPPLQSSFSFLSPGGTSEEDEFPFEDSNNSTPREDEDDKATGFGELKPLNQFFNMLTATSVQSGHCFLKQLRSGAGSPEPGLHRARSPSLAYGVFDYESDEDTESDTADDSSVKENGPQNDSKVTIVKDADSESKPMEEPAPRISTSDTRSSYNEDLHSDTSADTFHDAASRRSGLLDFEKVAPTAEFETIQENSFESSALDDTSDQRDSKLSVFQQSILDNLDPQLIHEGVLIVHNEKKDHSTTENKDSELYKRKVRDLRLKIADKLTLVFQLKDNEYFCGNYNAWLAKDVLLQGHIYLTHKNLLFFSFLPKRYSHDNMTDSDGFQSVDDSDDVVQAGTLSMRNPNFTDQILSGPMAHRFWVILRSETLSVYSSAVDLYFPTVVIDLKDCIHAEIEDSKANREMGITSPRCGFGKYSETATPRSYDSTVDEESDISSFVAQDQKPEENPLTGGVWIRLQTKKRTFRFCADNQFSARKWVNNITKVVFSLQNSNARNEVLFKVPIQSIDRIEKNILFDVANNSETDEEPTISVTIIYTVNQKRLSTTRMKERLSKQSKGDDEQTVNSNQRKIHLLFFQHGAKFMEAISCFMSADQDATSDVQTMFSRGSDPSSKISMESESIINRAKTPKRKVSRVDSRSDQSISTLCDNDTNQLLEQLFVGSYGSTPTLTPTETNNESSTIKKIGKSLASPSRLFSRSRSSSFADEKRLEFVESGGLDVAWQLPRKLSLTGLKNINFSFEASQKQVSEAAARYNELSDAETPDEYVKSKSEILSSHTAMPTPLNFGEASEYEQAMPKKSLGLKTFSKSIKAISGMSGIWSSNPTHYEKKDNEDPYYEKDSSFREISNKNFLNHFSFNMEKRLVASYTTHLQRSLPVYGKLYLGDSDLCFRSLLPGVSTKMILPLKDLENCYKEKGIKLKYSGLVLVIRGQDKLLLEFGSQKSRDDCEAMILRQLEILHGRENWRPEPHQWGPKYIPDEVQAPGIEWKKDMEMMHIRAKQARRRRINQARIQMFEEKLNAAIGMDVPLLLEDSPLIKTEVRPSTSFKFTLLTIGSRGDVQPYLALAKGLQEEGHDVTIATHSEFKEWIEGHNVKFREIAGNPTELMALMVRHGSMSVTFIKEASSKFRSWITELLSSSWDACQGTDILIESPSAMGGVHIAEALGIPYMRAFTMPWTRTRAYPHAFIVPDQKKGGSYNYLTHVMFETLFWKGISGQVNRWRQNELGLPRTSLLKLQQTKIPFLYNISPSIFPPSVDFPDWVKVTGYWFLNEGGSNFNPPPELLEFLSLAKENGKKVVYIGFGSIVVKNAKSLTKAIVEAVQEADIYCILNKGWSDRLSDSDDKAEKEKPEIDLPPEVFNSGAVPHDWLFPRIDAAVHHGGSGTTGATLRAGLPTIIKPFFGDQFFYASRVEQMGVGLSLKKLNSKSLTKALNTVTSDFKMIEKCRSISERINHEDGVSAALEAIYSELEYAKHLSISRRASGYEASGSQTPVVYEQSDESDESGYDDEDESEETETDEESTDNEDITEIENVPHLDYVQNHRKSSESSSEEDVAIATTTTND

SEQ ID NO: 7785 - protein, 885 aa, Fusarium fujikuroi
MDLSRIKSHGLGHVAIDDSDTDNGPSGNVIDDGRVKVQFHDTPQALAQWCEHLKEAFAADGADSEHLLPPKPSKPRRTSTVAFLPGVEKPAEGPRLNIAIHIVGSRGDVQPFIPIAQLLMKPPYGHRVRICTHASFKEFVEAQGVEFFNIGGDPEALMAYMVKNPGLLPNKDSLKEGDVGKRRKEMMEIISGTWRSCIEAGDGMGDPVKAATVENVDDLFLADVIIANPPSMGHIHCAQKLNIPLHMVFTMPWSPTKAFPHPLAAMSYGDADAKVANYLSFMMMELLTWQGLGDLINKFRRQTLHLDPISPMWGFQLLSRLRIPYSYLWSQTLISKPSDWDEHLNITGFSFLPLASSYTPPKDLLDFLEAGPPPIYIGFGSIVVKNPQALTNMILKAVELAGVRAIVSKGWGGVGVGEVPDNVYLIGNCPHDWLFQRVSAVVHHGGAGTTAAGIAAGRPTVIVPFFGDQPFWGQMMARAGAGPVSVPYKELTAEILADSIKFALKPEVQEVAKDMAIQIGEEDGAGGTAQDIQDRLDIDSLRCDICPDRLANWLDRKTGAHLSGFAVGCLIDAGLLQSQNLKLLRHRHWYVDEGAEYPLVGAVAAVSGFASAIGTATSDYAERLRNSPGRGKTRRSSVDDAQEEVLTDPEEAKTGEARLRKGPRGANQKDMEILARKMATKTLNGAEPVFLTPKLRRPVTGLHQKHKKAWRAHEGGRNGRVFYVTRVTGKYVGDLAAASARAPVAFFYNVANGFHNAPSNFWNVEVRRRDEITGLGSGLKVAGKEFVLGFYDAFSGIVTKPYEDTKARGIKGLGRGLLRGGFGVCGNLGAGYALKGLEKEMMKHTTTRLKAELLLIRLRQGHQDWQRATEGEREEVIRRWRALKL

SEQ ID NO: 7786 - protein, 1572 aa, Sporisorium graminicola
MSTTRPTSPPEHSTPLANEGSTHASPAAVATDLDPFIVDDDAHHDIHPPSPPPPAQIPHNLDTPPFPTSPRLDPWSPRDYSTISSLAGSRELGRPALEPTTKIFAEGAATSALANESSTGFVQPATVGDDPLIDPVAVDVSFHAEPQGLMQMLSLVGSTFFDADTDGYTEDDAEDLEEAQQPDKAAPELLQDCQQQEVAQAESTLEGAQPDPTDHVEYPFDRTVKGRLHSLARDDGSDDGSTPQGSRSPLDASVLTIGPNHSKRTSLTQSDIISSSRDSAATRAARKPFNLRSQLHNVATASMFASTSNVVNRGRDLDAVQLRRGSSPFDSDPTDGQDVPVAVQRVSLRLPSQAGHLPSRSLDLLIRPYLESQPPGELAADKSAMHRDRLLRQLKDVFQLDATEMLLLAQPCWLFRSLLLQGHLYLTSGHVCFYAYLPSRDEKTIKTSWLRKRTRRTHRFSKHWASLKAGKLSWFDSDRDPYFPQGHIDLRKVSAIERSNAHKDRFKVTTPARRFTFLTEDEQSRDAWVEALQKETFRAQNQGESVRISIPLETVMNVDTTLSVDGTEMVCITVVDEAGDFSVDEYYFLHLTKPTAFIAELGSLLEQMGTGSVASLHSGEAALHLSRLSIRDSTGATHAAAISRKSLEEVPTLPKVRVPAQPDEEAAHPAEATESNIPKAGPTDPVPVEVPRRGSSGNPASATFTASSAVAVPISIRKDSQEGSTADAILSTTPRATTLNRLSMESTHTYPPSPSESDPPTSFDQAQREAERGWAIPDWLKSAPAKVLGRGSGGKSATVLQSKAPPTEASVRRRRKVLEKWSDDKGDDLSRGESSNTDNEEELLSHSIHSAQSNYSMLDADDEEAESADHASVAAEFRDTFGIGEDESLVGHAHAYLYRVLPVAGRLFVAEHHLAFRSSGIAAKTVGRTLMLVPLQDVISAAKHVAFRPGHHGLVINISGHEELFIEISSVHRRDELLSLIEYQLELIRGGRGSIQSREAVTRERSHALVLRDLSERINDAPSTASMTSSADSSMLSQAGSRLGSRSNSVSQMGAGSSLLSFSPATLLTFTMLTIGSRGDVQPYIALAKGLQADGHRVRIATHGEFGDWILGHGIEFSEIGGDPAELMRICVENGTFTVSFLREGVTRFRDWLDDLLASAWRACQGSDVIIECPSAIAGIHVAEALQVPYFRAFTMPWTRTRAYPHAFAVPNKKAGGNYNYMSYVIFDQMFWRASSFQINRWRKTLLGLKPTSFDKLEQHKVPFIYNFSPSLVPRPLDWFEWIHVTGFWFLDNPDNRGSKAWEPPGELVAFIRGARERGRKLVYIGWGSIVVPDAAAMTRCVLQAVRKSGVCAILSKGWSDRLSTDPAGRASEAVVNEDVFQVSSVPHDWLFPQIDAACHHGGAGTLGASLRAGLPTVVKPYFGDQFFWGQQIESLGVGSCVRQLTADSLAAALITATTNVKQIQRARKLGEQIRSEDGIGNAIKAIYRDLDYARSRVKRDTRIEVKEAKARQGDTAMPRPPAKEAEGRQSAEEDEDGDDDGGNTSDEWSDIGGAASPNPHRPVPNSSVVLS

SEQ ID NO: 7787 - protein, 1311 aa, Aspergillus flavus
MIAAVGSKSDFHARFDESSDSEGEAEGQTQKQPGKASLSNKKKFPLSPTLKPQSTLEGRGRRHRRSISDNKLLRSLKPSPKSSKGTETTVQTEPPTSDEMSPLASPRRARSATPRAAPILSRMLEAEALLDKKQSADQPSSSTKGETDGTSEQSCASPLSLRLKEMFGFEMPEKVLMEYACSLLQNILLQGYMYVTEGHICFYAYLPRKSAVTIRSGYLHKRGRKNPKYNRYWFSLKGDVLSYYTDPSSLYFPSGHVDLRYGISASLTEQKDKDKEVRDFQVTTDQRTYYFRADSSASAKEWVKALQKVIFRAHNEGDSVKISFPIESIIDIEESPITDLAETFKIRVVESDESYAIDEYYFSFFESGRDAYNFVKGLISEGPMKTSQLLPPPSEQTSPATRARGPRNRWSLNSDLSQSRGNGIFKTQRKRSASTGQTNSGPDGIGMSPRQRDLSDSFVNSFEQATDASAVLQSMIDTTESASQILNRSDVFQSPTIHTLRQRHPSGDRTGRRLSDGTARSTHPNAADANRNGQEMQYASSDSDQGTQHPSKVNSSAPTLNELVKAGAYPLQRAAGFAEYLRSRSRQMSNLLASESMGYIEKVSGMWAGGRRHYGETEGVLPDDQDVDPEDKEDGVKHGDRFRAHFALPSTERLQATYYAYLHRVLPLYGKIYISQKKLCFRSLIPGTRTKLILPLKDIENVEKEKGFRFGYQGLVIIIRGHEELFFEFNTADARDDCAVTVHQSLESMRFLVESGLLAEQEKDEIESAQAEHRMLQEARLDGAGEHDSHASVNESSELHPIFDDPRASIINFKPSESLRITCLTIGSRGDVQPYIALCKGLLAEGHKPKIATHAEFEPWVRQHGIDFAPVDGDPAELMRICVENGMFTYSFLKEASTKFRGWIDDLLSSAWASCQDSDLLIESPSAMAGIHIAEALRIPYFRAFTMPWSRTRAYPHAFAVPENKMGGAYNYITYVMFDTVFWKAIAGQVNRWRKKQLGLKATTLDKMQPNKVPFLYNYSPSVVAPPLDYPDWIRITGYWFLSEGGNWTPPTDLLDFIHRARSDGKKIVYIGFGSIVVSDPSALTRTVVESVLKADVRCILSKGWSDRLGDPASAKVEIPLPPEIFQIQAAPHDWLFSQIDAAAHHGGAGTTGASLRAGVPTIVKPFFGDQFFFGTRVEDLGVGICMKKLNVSVFSRALWEATHSERMIVKARELGAQIRSENGVDTAIQAIYRDLEYAKTLARQRSIVSSTPFSPTPSAKTTAEQEEDDVDDSEEWTFVGDDTEIDVSRRLRDRAVSDADMLPEPVTSAS

SEQ ID NO: 7788 - protein, 1468 aa, Capronia epimyces
MATLDTPPKKGGGRKLQKRNPNLNRLSSSRLPPRLRLGPDAQDDVTAPSRGKNTPAAYMNQSIFSMIAAAGSRTDFNSRFNDSSESEDEIVAEEQTPAADKLYPATSDHVQDVAAKETDASSDHTSKRLSGSRLAQPLPRLSARALKRKDKDQPPLQSPSPESDGTSRSSRSNPRDAPILSRILTAKAEFQESVDADVQVPSSTEGKRPRKRAESSPQTLLAARLMEIFGFEQPETVVAEYPCWLLQSVLLQGYLYITQQHICFYAYLPKKSHTVAKNGYLAKKGRSTSKYKRYWFSLKGDVFSYYSDPSNLYFPSGNIDLTYGISATLSTERGKPKESRDFSVITDHRTYHFRADSPSSAKEWVQALQKTIFRSHNDGDSVKISLPVDNIIDFEDSPVVDFAETVKIRVIESEDSYAIDEAISNYAQYFFSFFSFGQDVLHVLGELLTEAPPRRTSADVFSPTRRAEDASSPMSRYALPRQPSDGEPRSPRSHSTPPLKDNIRATLLPFHVGGDGRMSPRRSGGSSRGNSPSRSSGDYGRASFERGRRSGSTSRLDASTSRRKNRSPLARHHESEDSYVQSVDKETDSSTAPLSPRVEAQMSASQILTRSDVFHPHAVVRMETLASMSTEPTRKSSDGGTILSSSPQRETSSPMAMRGTADATGSYPRDVRETTHNEVVFSESDNGKKPFKDDPPPSLQDLVKAGSYPLQRAGAFAYYLKNRSVSMRKLLAEESMSYLEKVSGMWAGHRKHYGENEGIVPDDRGIDPEDEEANVGHGDRFRAHFALPPTEKLQATYFGFLHRVLPLYGKIYISNRKFCFRSLLPGTRTKLVLPLKDIENVDKEKGFRFGYHGLVLVIRGYEELFFEFSSAEHRDDCTITLLHSLETVRYMAESGVLGQHDEDDAEIAKQEHRMLQEARRNSGGEPQLVLPDTAETIYSHDEVSAVPFDDPRASIINFRPTAPMRITCLTIGSRGDVQPYIALCKGLLAEGHRPRIATHAEFGPWVQKHGIDFRPVDGDPAELMRICVENGMFTYSFLREASAKFRSWIDQLLTSAWHACQDSDLLIESPSAMAGIHIAEALGIPYFRAFTMPWTRTRAYPHAFAVPEHKIGGAYNYYSYVMFDNVFWKAIAGQVNRWRKKELALRSTNLDKMQPNKVPFLYNFSPHVVVPPLDYSDWVRVTGYWFLDEAHDWQPPEELTAFIKKARDDQKKLVYIGFGSIVVSDPAALTKTVVDSVMKADVRCILSKGWSDRLGDPAAIKTEVPLPMEILQIKSAPHDWLFRQMDAAVHHGGAGTTGASLRAGVPTVIKPFFGDQFFFGSRVEDLGVGICLKKVNVSLFSRALWEATHSERMIVKARLLGEQIRKENGVQTAIQAIYRDLEYARSLIKPRPTGPGASASAAGDADDGGEIEENWTFIGEESDPDLQRRMHDWESPRRGRGLGVGIEGAAGLRAIQGVEPVRSSGVQR

SEQ ID NO: 7789 - protein, 1278 aa, Lachancea lanzarotensis
MAKKQVSGPGSVILASADGAGRRSSTSQRRWMRSLSPVGKLYHSSASLMHFPGRTVGNERASPAVSDGEEAATIDSGNRDLEPDLACPRGMAKSIVGLLTTASVYAGMRDMEQAAEICEDDPLADDDGEDSTVSKSEEDQNQDQDQDQNQDQNQDQEQEQNDNNEAKMETMRRTSPQMDRNDSSDSLDATIDLDSLADTATHVSKKDTLFEISVEPNHDAMSVLSTSSGSRQQKIYRKLLSRFNLKEEDDEFVLRQSCWLLKDLLIQGHIILTSRHLLFFAFLPKSTGTAKMSGSLSTFSGGLRGRWSRYWAVLKDHTLSLYNSRQDLYFPLLTIDLRYASRIELDNRGHGATGTFRIRTEAKTYKFRADSHFSSRSWSSALKKQLFATHNSDNDSMSVRIPLANILDVEEQMVVAQSVTLRIRVLESPTSFAVDDYFFMFLGKSEMNLRQAINTQLSKMDKPPLKSSDINRLSIPVSELNDDESELLEKTQRGRSDSSSRKIMKRVLSPVSRVRRPSFPAHVHLSHKYPQRALSLLKPKNESESRSSSFKDEASSRVSHTTPQETVELASPQQLQVSPDEISDSDESVQVSEENKMASSKLASWTPRPIKNMGSMWGAHPVHYRQGPADIFPDDDQYLASVKEQSVASKRFKSHFSLKDDEILRAAYYTHLNKNIPVYGKLYVGTSVICFRSLIPGNKTKMILPIEDLENCYKERGFRFGYFGLVLVIHGHEELFFEFSLQSSRDDAEYVTLKEIDSAKLDVGSPVSTIDGISQKLRSTDISAEQKATDAGKLRLFEDKINAEGYDLPMMVEESPFFKTSISPKKSYRFGLLTIGSRGDVQPYIALAKGLLREGHRVTIISHSEFGEWVKSYGIKFREIAGNPAELMSLMVQHGSMNVGLLREASSKFRDWISELLGTSWQACQNLDILIESPSAMAGIHIAEALQIPYFRAFTMPWTRTRAYPHAFIVPDQKRGGNYNFFTHVLFENIFWKGIGGQVNKWRIETLGLKKTNLMLMQQNKVPFLYNISPAVFPPSVDFSEWIKVTGYWFLDGKDDFKPPQELANFIAKARKEGKKLVYIGFGSIVINNPKKMTKAVVDAVLEADVYCILNKGWSDRLDGDSTGNDTEETFPSCIYSSGSVPHDWLFPQIDAAVHHGGSGTTGATLRAGLPTIIKPFFGDQFFYAGRVEDIGAGINLKKLNSKTLSRALKEVTTSSRMSHKAQQIQQEISREDGVETAISCIYSELEYAKSLVQAKNKDKQDDVKDLGSPEENSWFLV

SEQ ID NO: 7790 - protein, 1285 aa, Unknown
  Description of Unknown: fungal sp. No.11243 sequence
MAATPAPQWPQPDRIPYRRKQEAGGIPVPDRFTDEDQEDTQGEEEGTGSQRADLPFMHQSVFGVIAAAHSKEDFGNILDQDGSGDDSQDEANSSRPRPADAASGEPTNSPAPKVKHKKKLSEHRLIRSLPGIRSKSSNDKTTSAAASPATSPLLDQQPSSRDAPIMSQMLHARAHAENLESSTATLTAKPIASASASTTSLKATGKVPMALPDALKDIFQFDQPEEVISEYPCWYLANVLLQGYIGKTNPHFRRYWFTLKGTIFSYFADPSAPYFPSGNIDLRYGISADVVLDKDKKTTNFFSVTTDKRTYHFKADSETSAKEWVRQLQKVIFRSHNDGDSVKISLPIDNILDVEENPVIDFAETIKIRVIDNDETFAVDEYFFSFFSFGKDAINVLKIMTQDTAAAKALAEQRPATTLDLAPSDSSAEISKSKRSPANLTVHDIYENVRATVAIRRSSIEEEGRGTDSLRRGNAGETARRSTEGDRTRKSFDRNQRSPSAASGVSFNSSRPVSEIPRVGDLSKSQASSMTADESGAPSRATDLLRDQGKRVSNLLGSSPRGYYEKVYGMWAGGKKHYADADGLQGEDYVYDPDEESDTAQAEARFRDYFALPPTEKLVATYFAHILRVLPLYGKIYIGSTKLCFRSLLPGTRTKLVIPFKDILNVDKEKGFRFGYSGMVAVIRGHEEIFFEFNTAGLRDDCTVTVLKALETLKFSGRPSTVSEEEKAEADRAASEHARLQEARQDGYIEHDLALPSNFDDIERGVPPILFDDPQASVLEFKPTEPLNITCLTIGSRGDVQPYIALCKGLLEEGHKPRIATHAEFGPWILKHGIDFAPVDGDPAELMRICVENGMFTPSFLYEANSKFRGFLDTLLTTAWTACQGSDVLIESPSAMAGIHIAEALGIPYFRAFTMPWTRTRAYPHAFAVPNHKMGGAYNYMTYVLFDNVFWQSTAGQINRWRRKVLKLRPTNLDRMQPNKVPFLYNFSPSVVVPPLDFSDWIRVTGYWFLDEATTWTPPDALVSFIRKAREDEVPLVYIGFGSMVVSDSRAMTQSIVKAVEKADVRCILSKGWSDRLDAASRTEPDVPLPDCIHSISSAPHDWLFGQIDAAVHHGGAGTTGASLRAGVPTIVKPFFGDQFFFGARVHDLGVGACIRKISENVLGKALWIATHDARMREKARILGEQIRSEDGVGTAIKAIYRDLEYARTLVRRKLVPLKSPQPNDDADDDDDDDVDGDGQRQGTADQDSDNHEAAAESWTMVGQDSEGSDTEHHHRGGAVAGLEP

SEQ ID NO: 7791 - protein, 1389 aa, Yamadazyma tenuis
MSSPPSQDQPQAHSPSAAPQDYFTAKAPSSGNQSPQIHQDDTDLENSSVPAYICRSLSDRIIPSLQASIGQIYSSVATPTETETDAKLDTNSETGSEPVGSTPRTLDTINMQSLTSFQSSMVRNFEILKKDGVLVRFTEDSNSSTPIDDVLSTNLKLNIADRLQKVFSIQDDDIFYANFNGWLVRDVFLQGHIYLTKNCILFFAFLPSKFSSPPDSQSDGEFRKQDDSSVYIQTGALATKTKKYGEILGTVFTNRSWAILRPETLSIYSSPTDLYFPTLVIDLRTCVHAEILEKYQPKTENASNVSKPVPVGSPTDTPSGILSPRETLSRGNSDDLLNDDEELNKMLALEAEDNKESNNGGVWFKITTTKRSYKFQTDSIYSARQWVNNITKIIFQLHNSNSKNEVLVKIPLDNITSFNRSSLFGTSDIDVDDSEEVPAVFSLTYSTGTDNVLHQNKKIHKKFTEKAKQQLNLSGTEDLHFVFFSKAQEFDDTISKIVHDREDGNSESSSISNSEKFIQKMKLKRFQGPKEEHETELSKVDIPFSTLSPHGNPSAILDQMLEYNRAMLHSRTPSAASPSDVSSRSSESTSPMNLNLPRQLSVTGLKKLNMFFDTSKRDVGVVADRYGNIQITGPNGNEPVSEKSVLPSPLNLADPSEYVDQDYPKKDNKLKAFSKSIKAITNVSSVWNAYPFHYIQMNDKDPFYVTDEAARNLGQRRLRSHFSLGETNTLAASYFCHIQRALPVYGKLYVGNENICFRSLLPGVSTKMILPLRDVENCFKERGTKITFSGLVIVVKGYEKLFVEFSSHKSRDDCLDVMLEGLHQLHGSETWEPSAHEWGENYHEQSNKLRLSEDGEDTNQSLAPSDETLKQASMRIESARMKMFEDRFSVAAGLQVPIVLEDSPFFKTEVRPNTSYHFVLLTIGSRGDVQPYIALAKGLMEEGHRVTIATHSEFKDWIVSYDIKFREIAGDPTELMSLMVSHGSMSVAFIKEASSKFKGWINDLLKTAWVACQGADILIESPSAMAGIHIAEALGIPYMRAFTMPWTRTRAYSHAFILPDQKKGNSYNYLTHVMFETVFWRGISSQVNRWRVETLNIPKTSLFKLQQYKVPFLYNVSQTVLPPAVDFPDWVKVTGYWFLDEGTGNKYKPPPELIEFMRQATKDQKKIVYVGFGSIVVDDAKSLTKAVVESVLDADVRCILNKGWSDRHGDKEGEDSKEVEVELPFEIYNSGAIPHDWLFPRIDAAVHHGGSGTTGATLRSGLPTVIKPFFGDQFFYASRVEEIGAGIALRKLNSKSLSKALKLATTDFKMIERAKKVCEQIRHEHGVLGAIEAIYSELEYARSLIVNKQLANENYGMLGSRTGYTVNNSEDEDSSSIEIDISSKSETDF

SEQ ID NO: 7792 - protein, 1071 aa, Melampsora larici-
MTSSQPQSPPSSAVSSVEPPNSIASAAGLHDPILPYGLNGLGSTASMVGILKAAALNPYEDLDDGLADDSELWSPNTTQQPRAMLSDEESDDDDNTEEGLLFTPTRPVHPSSSLIRGASTLDYPSRHHLDGLARQLIERQTHCAEIAIQKTHTPLIENSSPSTRTLKLLEEPTSILNDILPEADRPSSPDRESELTPDDRLRLLEEQFGTWSGLDASGQPESESWIGQVAGVLYRSVIVKGVILLTDRRLCYIAYLPITDKGKLIRSGTATYKSGARFSKRQRRWVELRTDSITDYRSSTKLFRPLSSLHLSDIKRILPISPEEPRTLSFRLMDDHVIHLEFDTAESTALWHHDFVQALFSLKTHFSNQIKLSLPLRRIRKLHREVFENIAKMMTFELDFGVLSPFYTDSSEALSRGVVEEPIDEKDHSRIKMAYLLSHDPFDENIIDAIVRAKMEISSSQTESQPSTAHRTPLPVLEVLEPRDLESENVDDPTKLTESASYESTDKNMSDLAKGFVKAFGLEAHQKLYICPCSLVRTLPSFGNMSISNDYFCFWRPAVVIGQDLKLRIPLKDIAEAKECSAFGFTRSGLSIEIAGAADIRLDFSSQASRDETVKVINLAVDRVREAGARAARRQSSLPTHNLLCPPDESLPPSPLTARQRQSLPAIIGFVQPEPTTRPYRITCMTIGSRGDVQPYISLAKRLMQDGHIVTIASHPEYRSWVESFGILYKDLGGDPGALMKLSVDHAFFSPGFFKEGLGKFRQWLDDLFMEAWNACTESKAEILIESPSTFSGIHIAEALRIPYFRAFTMTWTSTSTYPQAFASSIDLGPTYNLLSYSLFDSLIWRAMSGQVNRWRKNTLGIPPTTLEKMQSYKVPFLYNFSSAVVPKPLDWRDHINVTGYWFLDQSQGNYVPPPDLTAFIASARADGQPLIYVGFGSITVPDAAAVTKAIYAAVVQAGVRAIVAKGWSERTQTTSADSVPIEVPPEVHVLSSIPHDWLFPQIDAACHHGGAGTTGISLRFGLPTLIHPFFGDQMFWADRVTRLGAGMRVDHLTTSCLSEAFVKATKDRVL

SEQ ID NO: 7793 - protein, 1456 aa, Ustilaginoidea virens
MDNFPALPPGADAAERDAPPSTSAEISVSQRRVSRKLKKKRLLDPAAPLLELPDPLRHSDSDDEDSPNDPASRRGRAVSVNMNQSIFGLIAAAGSRVDFNTRFDDGSSDEEDGETPRISDGPQDLSQTVILPARSRDERRGHKKRLSGHRLLKSLSTLPTLPKRKSKKRETSQLSAPSLDSSDDGKETTSPSPTAAAHLDGQDYRLAPVMSRMLQARAEVASRPSSDLDRRSGDSPGTDDAGESSALAKRLMEIFEFDEPELVIEGNNVVAKSGYLSKSGKRNPKYHRYWFRLKSDVLSYYRDSTNLYFPHGQIDLRFGISANIVDKDKDGLHFNVVTSHRTYNFRADSAPSAKEWVKSLQRVIFRSHNDGDSVKISLPIDNIIDIEETQMMEFSETCKIRVIDNDETYAIDEYFFSFFNFGKEAINVLKILVDGASSNSRTPGKLVAEHEQRYRGLEQQQKQRHGEQAVRQTSPRPSGLSDRQELHVEEMRTTKLPEAVKATLSPMPPHSTGPSPRASMDCSSRPSADAFRGMRRRSQDVSAMMREQSPRRSFSGHRRTQSTRRVDEKKPKHGVESPDSNTHSSTEDPSFSNLAISVATEDPTASQILQGSEVFHSPTMRKSIDASSQSTDAIGKDAKGGSSESCVPGASIPMKHAATTGHISQLGYHGKSAQQQQQQQQQQQPERSSTPTLQSISKMSAYPLQRAGAFADYLNKTGKRMSTLLATESMGYVEKVSGMWKGGRKHYGEPAGLRPDEDELEEDSDGKVQTSMDRFRAHFALPESEKLQATYFGCIIRVLPLYGKIYISDRSFCFRSLLPGTRTKLILPLKDIETVHKEKGFRLGYSGLTIVIRGHEELFFEFSQVDVRDDCTITVLQSLETSRYLRESGILHQEELEEQQVAMAERDALKSARREEFPAHEMAPPHDAESQPNAPTILMDETDGSFINFKPPQPMRITCLTIGSRGDVQPYIALCKGLLAEGHKPRIATHAEFQDWIESHGIEFRMVEGDPGELMRLCIENGTFTLSFLREANSAFRGWLDQLLDSAYAACEGSELLIESPSAMAGIHVAEKLGIPYFRAFTMPWTRTRAYPHAFIMPEHKMGGAYNYMTYVMFDNIFWKATAQQVNRWRNKTLGLPNTSLEKMQPNKVPFLYNFSPSVVAPPLDFSDWIRVTGYWFLDEGAEYEPPRELSDFIQRARRDGKKLVYVGFGSIIVNDPAKMTQEVIDAVLKADVRCILSKGWSDRISPRDDDASASAAAAAAASQPRPDEPPMPPEIFVIKAAPHDWLFGQIDAAAHHGGSGTTGASLRAGLPTIIRPFFGDQFFFASRVEDLGVGVGLRRWGANSFGRALWQATRNERMIVKARVLGEHIRKDRGVETAIQNIYRDLEYAKSLIKRKAGPHDEPDAEEDDTEESWTFVGSDEHDPDAVTKKLSEGLGRPAPGKTPPAALGSKVLKG

SEQ ID NO: 7794 - protein, 424 aa, Calothrix sp.
MRIAIIALGSRGDVQPYIALGRGLKQAGYTVRLATHENFEELVSSHDLEFYPVQGNVQEIIETKEMRELLEKGNFLAITSHTAKLAQDAAIHWANDGLVACQGMDLLLVGVGGQNIALALAEKLDLPLVQAYVFPFTPTKAFPSVLFPQFISKLGGFFNRLSHHLTRQLMWQGFRSADRLMREKVLGLKAAPFWGLYNCDRLHQYPILYGFSPSVIPKPSDWHNTHVTGYWFLDSAPGWNPPSALMEFLESGSTPLYIGFGSMGNRNPEETVDLILSALALSKQRAIMFAGWGGLRKQNLPSTVFLVDSVPHSWLFPRVAAVVHHGGAGTTAAGLQAGVPSIIIPFFGDQGFWGEHVAKLGVGAKPIPRKQLTAEKLAEAIQQVMTDKAMRQRAANLGARIQAEEGIAGAVAVIEEIRKNVTSS

SEQ ID NO: 7795 - protein, 1198 aa, Saccharomyces cerevisiae
MPITQIISASDSEAGPKPSISLVPDKPSEPETSPRHHRLSRSLSKFKRWRGRSNSSLSMGSSEQQELQDSPNEARSDDDENGYNNDNADDLAKSKYMMKSIAGLLTTASVYAGMNNAQEMNVLSQVDSEESDSSDSFQENIGRNEVKSKKENLKTKSHPEVPRLDKRKPTLFDFSITREKLSKDNVAKLRQRFCLDEQEPFLNDFPAWLLKDVLVQGHIFITTKHFLFFAYLPKNPRSVKMSGNLNIRTKLIRSTRYWCVLKNHLFSMYTSSTELYFPVLTIDLREVQKIETQKHTLNGSATKTFKLYTDESTFKFNADSEFSAKSWVNALKKEQFAAQNSENNSISLKIPLPNIIEIDDQPIVNKALTLRLRALESSQTYAIDDFMFVFMDGSGSQVKESLGEQLAILQKSGVNTLYYDIPAKKSKSSFGKETPATAEQKNNGEDSKYLNVPTSAVPSSENGKKSRFRFRERSNSWFRRAKPLEDSQVEDVEEIYKDAANDIDSSVHSTIHIHEQEDSQEQTVAWKPSHLKNFAEMWAAKPIHYRNKFIPFQKDDTYLIKETEEVSANERFRYHFKFNKEKSLISTYYTYLNRNVPVYGKIYVSNDTVCFRSLLPGSNTYMVLPLVDVETCYKEKGFRFGYFVLVIVIHGHEELFFEFSTEVARDDIERILLKLLDNIYASSAEGSNISSASLGDVQHNPDSAKLKLFEDKINAEGFEVPLMIDENPHYKTSIKPNKSYKFGLLTIGSRGDVQPYIALGKGLIKEGHQVVIITHSEFRDFVESHGIQFEEIAGNPVELMSLMVENESMNVKMLREASSKFRGWIDALLQTSWEVCNRRKFDILIESPSAMVGIHITEALQIPYFRAFTMPWTRTRAYPHAFIVPDQKRGGNYNYLTHVLFENVFWKGISGQVNKWRVETLGLGKTNLFLLQQNNVPFLYNVSPTIFPPSIDFSEWVRVTGYWFLDDKSTFKPPAELQEFISEARSKGKKLVYIGFGSIVVSNAKEMTEALVESVMEADVYCILNKGWSERLGDKAAKKTEVDLPRNILNIGNVPHDWLFPQVDAAVHHGGSGTTGASLRAGLPTVIKPFFGDQFFYAGRVEDIGVGIALKKLNAQTLADALKVATTNKIMKDRAGLIKKKISKEDGIKTAISAIYNELEYARSVTLSRVKTPRKKEETVDATKLTPAETTDEGWTMI

SEQ ID NO: 7796 - protein, 1189 aa, Talaromyces islandicus
MASENPPDLHPEDDAPGNELSRLPTQVDLSVGEVPRPAFSNVYGQMDLTGAGLNTQAAITADGRVNIDINERTPWLHSIFKLPALKHPKHEALLPYVPPSLEREGDQRLPRLNIVIHVVGSRGDVQPFIALGQVLKRVHGHRVRLATHPSFEQFVRENGLEFFSIGGDPAKLMAFMVKNPGLMPGIDALKNGDIRQRRFEIAEIISGCWRSCFEAGDGTGVPVSDADVDLRNFQGSSPPFVADAIIANPPSFAHIHCAEKLGIPLHMMFTMPWSPTQAFPHPLASISQSNADVGISNYVTYALVEMLTWQGLGDIINRFREKSLGLEPISILWAPSMIPRMRVPYTYCWSPALIPKPNDWSDHIDISGFYFLPLASDYTPPADLEEFLNAGPQPIYIGFGSIVVDDPNEMTRMIFDAVRLTGQRALVSKGWGGLGAEELDIPEGVYMIGNCPHDWLFQRVSCIVHHGGAGTTAAGIALGRPSVVIPFFGDQPFWGAMIARAGAGPDPIPYKQLNAEKLAAAINKALEPTTLEKAGELGAKIRGEKGTEEGALSFQRQLKADTMRCSLAPSRVAVFRLKRTRIKLSAFAFNVLNTEGLVELEDVKLYRPKEYLTEADPCDPVIGGGAALLGNIEGLIMGFADLSHDIRRGFNIGGSRPGSPRIGSKRSSREGSPASNTEEVVEDGQLAKSSSETSSRAIQRFALGTSRKGSDASEKTSLRGRSMTTNSQTPSTRTNATSTTVTTTETAPAQKIDLDGVISAGKSAAKIFNMGFRAPADFTMAVAKGFHNAPLIYNDDTVRESPKVTGFKSGLKAAGMEFGYGFYDGISGLAKQPVQGAKKEGAAGAIKGFSKGIGGLILKPASGIWGLTGYTLSGIYKEVQKRFGESVENYIMASRCAQGVCDAASATAEERDGVLRHWKYLEAEFVRKKAARHSQSKFNDRTVGPRASTMALESPSAEIHPREVDETASTREPGRSAADRARRRQALRDLFRGRSNSSPSRLARSNPAALPPAYEEAILHSVHETSKGDATEDEMIERALRASMVELQAAEAAGEEEQRAYERALDASIREAERVLAENKKSMLHSPSGSSSQIKSPALDVFDQEARRPQPPPLPPRAMETDGTSDPDLQAALLQSHASYEESLQREQREKSELDMVMDYVKRQSLAELEYERQRREASGVEDTTNDLR

SEQ ID NO: 7797 - protein, 1776 aa, Phellinidium pouzarii
MRRFVAVILVIFAHVGQINTTTVPRGLGMIKVNMSGYGIALQNSIGDPVQGLYATNASTSIGEGTGLRQIYQFGLYSYCAYIDKVQGSCSNSSAAFQLDPYEVVLADMFSNYSSLTKGFIPTNLTFTNSHYLSEFSNAAYYLLLLGSICAALAMIIGIPKKTYTYLLSTLFAILGTGLLFVGVVIWTVLVNKTESINRATVTTSGSDSEVTPLGIIVSAGASLWLFWASFVCLFLSIMPYLVSLEVGAAFSATARKMSDLPPPSLQNPIKGTTINTSPEALGLEHASNESPLSQSRVRINSNSKNAIKRTVEHTAARIGSRVLNSGSRWDSNVSQQGRLSSSLTVADPRRFRTLRKGKGRERESLENMSEENLSSSTRTSLTSRSTSVRQASVSVLDDSPFIRPLSPSPTSTPPRRPSLDAFQTFGSMRAGTQTLIQAIQAMPWTDEPEGDDEAIPPTAYNSDTSDEEQMELPLASSIHTIHRPIARSRRHDSYLASKSPNGKGKRQGYFSPVQSSDEERGDVTDEDEDFERTPIESRHLYRPDEFPMHEEDISAVDAGADKMDRLAHVRRVKMTRSASLATVRIKRRTMLAEKLKDVFGLNEINEVVAELPCWLLRSILLQGYMYLTNSHLCFFAHLPSREDQVLKSGSLNKKTQRTKRWVKHWFVLKNDVLSWYQSSADPYFPHGVVDLRYAISCDPTQEKGFRIRTNQKVVTLMADSVPSREEWVKAIRKVIFKAQNVGESVKIAIPYSVVVDVDKSSAMDFSETIEVKVIDLEEKVADDSNDSYFFAYFHNISAALDQIRDAVKTYKPCSPNAINISEVVHDTTGVKHASPNGSPFDRTISLPTEQQASRAGYGLKLAALLRPFQSDTSSVTPAQNYAQPKTQENASVLRQSGVLVSSPPAPSAKTLHPGLTNLTTAMDTSESSASQRLLSEAAGIASVRKIDASHTYPPPPSPPSELIPIATRDNANSWGVPAWLRSSRRVFATPSASISGLSIGQKGVSEIISNVASSSRAGDRGPLDFGFSILETRDAAEPGAAEKFRTTFAFDEKEQLLGYFQGYLFRLLPTYGRLFISTNFFCFKSSGPLASRTRMQLPIRDILSLEKTTAFRFGHVGLVIIIKGHEELFFEFGSADRRAAFVTLLEHQIEETQLRLNTGSARSPSDAKRDALLLEELEPASLFGDEEPKPPPESMTDSLPAVMFTSTSSTFLTFKPLQPLHFTCLTIGTRGDVQPYIALAKGLMADGHRVRIATHGEFKEWVESYGIEFGYVGGDPAELMRICVENGMFTVSFLKESMQKFRGWIDDLLKTSWEACHGTDVLIESPSAMAGIHIAEALKIPYYRAFTMTWTRTRAYPHAFAVPEHKMGGGYNYMVGSHFSHRFVLEKSIPDSFNYQSYVMFDQVFWRATAGQINRWRKNTLHLPSTNLDKLEPHKVPFLYNFSPTVVPPPLDWPEWIRITGNWFLDDAEVSATKWSPPNDLVDFIDSAHEAGKKVVYIGFGSIVVSDPDAMTRCVIEAILQSGVHAILSKGWSDRLQVKKGTDVSEPETPLPPQIYPIKSIPHDWLFKRIEAACHHGGAGTTGASLRAGIPTIIKPFFGDQFFWGDRVEALGIGSCVRKLTVESLAEALAVATTDEKQIAKAKLVGERIRTENGVATAIESIYRDLEYARSLIKSSNVVEEEEDATIGEEQRMHTSTHSATFSSPRSSADSYLESGQEAQSEDWSVISDTDDRRSSRHSNDLRTQSPISKRNSLAAAVLSVLPEALQLSSPKNTRI

SEQ ID NO: 7798 - protein, 409 aa, Streptomyces antibioticus
MTAGSRGDVAPFTGLGHGLLRAGHEVTLVTHGSFEPLVAGSGLGFHSLPVDPRTVLESERGKGLHRSATGPGKLLRAVTMARALASTMADDLVAAARAADVLLLSASLAPLGHTIGEGLSLPTLGLSLQPVASTREFAPPMLGGGSWGGLGNRAAGHGVSMAIEHVFSSVVPEVRTRLGLGQVRSVTALRRRERRNWPVQHGFSPLVVARPRDWRPGLDIAGYWWPYDVSTELPSEVRDFLDAGPPPVFVGLGSATVPGPERLSADIVRALRRAGLRGVFQQGWAGLAADGEDMLTVGEIAHSALFPHMAAVVHHAGAGTTGAGLRAGVPAVPVPIQFDAGFWSQRLVSLGVAPTTVPLRRLTTDRLASALRTITRDAGYRERARELGARIRKEDGVAPVLEAVNCLRG

SEQ ID NO: 7799 - protein, 408 aa, Actinokineospora spheciospongiae
MRVTILTVGSRGDVEPFLALSRGLLAAGHDPVIATLAEFEPMVTGAGIPFALLPGNSRAVLAGPEGQALMAERNPFRLIERMRAVIGPALLEAHPAAEEACAGADLVVHHTMAVFGITIAERLGVPSVAAHLFPNSPTREFPMVAMPSAVPAALNRLTWRIAESLPWRAFRPLLDTRRAVLGMPPLPRRPLSRWPTGAPARLYGFSPAVVPPPADWRADDHVTGYWFTEPGAYTPPQELVDFLAAGPPPVYLGFGSASGGSPGETAELLLSAARANGLRAVLHTGWAGLSATAEDTLTIDDVPHWWLFPRVRAAVHHGGAGTTAAALRAGIPSVVVPFFADQFFWGRQVVELSVGAVTATRDRVTGPELAEALRTALTRAPRARELAAELAAEDGVATAVEVLESVVR

SEQ ID NO: 7800 - protein, 1227 aa, Galerina marginata
MSQSKQQSTEDSPFIRPPSPPLRPSLQNSFRGDGSMRAGTQTLIQALQALPWMNSDNEEDGPNEIGSADSDSDEEEKPNLKRLSSSIHTIHRPLARSHRVNIPLPSKLSYIQPPQEEDILEDTLSPSDEELENDFEEAPRPDDVLPHPQRPGQVISANASRAPFNAMRERAGSMATVRLHRRARLAEKLKEVYDLDEIKEKCPAGSSVLSGYMYLTNSYLCFFAHMPSREDQILKSGSLNKKAQRTKRWIKHWFVLKNDALSWYQSSSDPYFPHGIIDLRYAISCDASGERGFRLRTNSRTIVLSADSVPSREEWVKAIRKVIFKAQNMGDSVKIAVPYSAILDVERSTAMDFSETIEVKVVDKEDHFAVDSYFFAYFHSLPGALEQIRDAVRSYRSSNGAETGTPPIVLDTTFPRSPLTAERPNSIATTTSESPSAKTMSGFRLSSIFRPFSDTAVRGASAPTVSDLQSDDYTHVSRKVDSSSFIPITTSPKPMTSPLPPHDLSASPTLYSTQSLPPPEHTYPPSTSASTIYPNHSSLSRESTSSWAVGVPSWLKTPRRVFGVSTGTEPAPTLNSTPVKEIYSSSAVSSPGPISRPSGLGDMAFSVLETPDMLPEQEMADKFRAAFAYDEKESLLGYFPGYIYRLLPVFGKLYISTNYFCFKSSGPLAARTRMTLPIRDILASEKSKATRFGHHGLIIIVKGHEELFFEFGAEDKRDAFVQLLDRQMEDVRKRLASGDVELPSSGQRDALILEEFEARNSASGESDPLPPTDNMADSLPAVMFTSASSTFLTFKPKKSMHFTFLTIGSRGDVQPYIALAKGLMVDGHKCRIATHGEFREWIESHGIEFGYVGGDPAELMRICIENGTFTVSFLKEGLLKFRGWLDDLLKTSWEACQGTDVLVESPSAMGGYHIAEALAIPYYRAFTMTWTRTRAYPHAFAVPERKMGGSYNYMSYVMFDQVFWRAQAGQINRWRRNFLHLGPTSLDKMEPHKIPFLYNFSPHVVPPPLDWPEWIRVTGYWFLEDADVSAKKWIPPATLVHFIDNAHKTGRKVVYIGFGSIVVPDPKAMTHCVIDAVLRSGVHAILSKGWSDRLQVKTSEATEPEEPLPPEIYPISSVPHDWLFQRIDAACHHGGAGTTGASLRAGIPTVIRPFFGDQFFWADRVEALGVGTGVRKLTASNLSDALAAATSDSKQIARAKIIGEQIRGVMPSLLYKKHSDYWTRRME

SEQ ID NO: 7801 - protein, 420 aa, Vibrio coralliilyticus
MNILIVTIGSRGDVEPFIALGQALLARGHAVHLCAALRFKSLIERYGLIHHPLSDDLFKLADGGVMEKLGNPMSAVKTIYQLTKSAKSINHQMMADSIAAGFAAQPDLVIFHPKSLAAVSLADKLGVPAIMALLQPMIVPTKAFPPAGLPDLGGCLNRVSYRLIDMGYRQYIHELNKLRATLLHLEPLEKNSGVFHRSDRQEVPRLHAFSQHLVSRPTDWPENAVLTGNWSLSIDQDDYKPPKALIQFLESGQAPIYIGFGSMAGRDPKQLTQTIIHSVSKAKLRAVIATGWGGLEAVPENMLIIDSAPHNWLFPRVAAVVHHGGAGTTMAGLKAGKPSLICPFFADQPFWGKTIYNNNLGPKPIKQKHLNVDTLTPALVDLTTNKSYQRYAAKLEKQLNIEDGLVNAIHWLETHGYLSR

SEQ ID NO: 7802 - protein, 404 aa, Streptomyces sp.
MRIVIVTAGSRGDVAPFTGLGRRLLDAGHQVAVAAHPSFAALVGGCGLDHRPVPGDPQGLIRDLARAASRKEAQALTKAYADGLADGVAEAVAGRADLLLTAFGPAPLSRTAGEAFGVPVIGTYLAPSFATGQFPLPNARSIDELGPAGNLAAGRDVLKRAEGVFAGAVTRLRARLGLPAGASPAPVDVRPVFHGFSPLVVPRPEDWPSWAEVAGYWWPARPDGWHPPAELVDFLQAGPPPVFIGFGSMAAGQGERLSELVAAAVKRTGVRAVVQTGWADLNGCGADVLAIGDIPHDWLFPRTAAVVHHAGAGTTAAGLRAGVPAVPVPVMADQPFWASRLYALGVAPRPVPFQELTADSLSAAITTCLSEPSHRRRAAELARQIAAEDGTAPLLVHIGSESAG

SEQ ID NO: 7803 - protein, 581 aa, Pyricularia grisea
ERFRQHFALPESEKLVATYFGHMIRVLPLYGKIYISDRSFCFRSLLPGTRTKLILPLKDIENGHKEKGFRFGYSGLVVVIKGHEELFFEFGQAEVRDDCAITLLQQLESSRYLQESGMLGQDEKEDAENAVAERDALQSARQEERPTHEIPLPKQTSVVSDAPTILFDDPKASFLNFKPPNPLRITCLTIGSRGDVQPYIALAKGLLREGHEVRIATHAEFEPWIRSHGIDFRKVEGDPGELMQLCIENGTFTWQFLKVAASKFRGWLDELLSSCWQACQGSDLLIESPSAMAGIHIAEALQIPYFRAFTMPWTRTRAYPHAFVMPEHKMGGAYNYVTYVMFDNMFWKMTAQQINRWRNVELGIPNTSLEKMQPNKVPFLYNFSPYVVPPPLDYSDWIRVTGYWFLDEGTPRKAAAEIEDGDGSEEKSTDQQGEGKNAASGSNWTPPPELADFIEQARADKKKLVYVGFGSIIVNDPVKLTQEVIDAVIKSDVRCILSKGWSDRMSTGSNATDPKPAEDGEKVETDQQPVEKKEEPKLPPEILQIKSAPHDWLFAQVDAVAHHGGSGTTGASLRAGVPTII

SEQ ID NO: 7804 - protein, 404 aa, Streptomyces netropsis
MRIVIVTAGSRGDVAPFTGLGRSLLDAGHQVAVAAHPSFAALVDGCGLDHRPVPGDPQGLVRDWSRAASPQEARALTRAYADGLADGVTEAVAGGADLLLTAFGPAPLSRAAGEAFGVPVIGTYLAPAFATGAFPLPNARNDDGLGPEGNLAAGRDVLRRAEGLFAGTVARLRARLGLPADGPSAPGDIRPVFHGFSPLVVPRPEDWPPGVEVSGYWWPARPDGWHPPAELVDFLQAGPPPVFIGFGSMAVGQGERLSELVATAVERAGVRAVVQAGWAELSGCGADVLAIGDVPHDWLFPRTAAVVHHAGAGTTAAGLRAAVPALPVPVMADQPFWASRLYRLGVAPRPLPFKDLTAEALGDAITACLSEPAHRRRAAELARQIAAEDGAASLLAHIGSERAG

SEQ ID NO: 7805 - protein, 749 aa, Aspergillus nidulans
MLSYPSSLIPGGGRVREDGRVEVNLDSKACRAVAELIGTSPAEVDHPLGPPPPYEEVQPIGTQQLLGIRFNIVIQVVGSRGDVQPFIALGKELQKHGHRIRLATHDIFATFVRNSGLEFYPIGGNPAELMAYMVKNPGLIPQLHSLRAGDVQKKREMVAEMLDGCWRSCIADDPVTKTPFVAEAIIANPPSFAHIHCAQALGIPLHLMFTMPWSSTRAFPHPLANLKYSDTSQEMANYFSYGIVEWLTWQGLGDVINSWRSKLDLEPVPATEGPMLTQTLKIPFTYCWSPALMAKPADWPAHVDVCGFFFRDAPDYKPPQSLDAFLQNGPPPVYIGFGSIVIEDPKKFTAIILDAVRSLGVRAIISRGWSKLGGEPSESIYYIDDCPHEWLFQHVCAVVHHGGAGTTACGLRNGRPTAIIPFFGDQPFWGNLVAVSGAGPKPIPYRDVTTTKLAEVIEFCLQPQIQHAAQTIASRMQYEDGVKTAVDSFHRNLPLDKMRCDLLPNRSAAWTCKTPSLRLSKLAAQILVEHLRVDRKALQFYETNPVVIENRRWDPVTGATSAAIGTGTDMVKSTADIFLKPYQEYQDLRRGRPRSGDRPDDNAYIPPAPRSLSTPPPDTLTQQPPDITSNPSTFHTTSTIATASAKSIGRVLTTYFKGTMVDIPLATAEGLRAVPRLYGEDVKEHKPVKDWKSGMVVGCTSFSQGMVDGLTGIVMQPYRGAKEEGALGAVKGLAKGTVGGAASLGSGLR

SEQ ID NO: 7806 - protein, 1316 aa, Phytophthora nicotianae
  MOD_RES (219)..(219): Any amino acid
  MOD_RES (252)..(252): Any amino acid
  MOD_RES (446)..(446): Any amino acid
  MOD_RES (655)..(655): Any amino acid
  MOD_RES (826)..(826): Any amino acid
  MOD_RES (874)..(874): Any amino acid
  MOD_RES (1149)..(1149): Any amino acid
MSHGVEFYPLGGDPKELAAYMVKTGGHLIPTKIETLTKDVPRNKEMIKEIVHSTWPAVSAPDPDGGGAGVPGKPFQAQAIIANPVSYGHIHVAERLGVPLHIMFPQPWVPTMAFPHPLANMPYTDELKKTNYLSYKMVDLLMWQGTEGLINDFRTKVLKLRKIRNGDGGRDLLLDLHIPHAFMWSPELVPKPADWGDLYDVIGTVTLNGGSNSSYTPSXELETFLGRDGGPIFVGFGSMVLADPLATTKMIXEAAQQAGVRVLIQSSWSDMAGDLDIPDNVFFIGNCPHDWLMPRVCAVVHHGGAGTTAAGLLAGKPTFIVPFFGDQPFWGHAVVKAGVGVKPCPIAQLTTEKLREAFVGLMDPALRARALNLRDVMRREDGAGEAVRSFYRHLPTQEMFCDLDHERIATRWSVRDRLKLCDRCAFIVSERPGNASKKMVSYHCVXYTARGPDSTLAGASSGTGAFFHEFAGAYTGLVREPVKGYSKNGVAGGAIGTLKGVGGFLVRPTLGLVHFTDRVVTGHINAHREEGEQKHSSILDRRFMSVIGVQRGLANSHTPSTEANCVDSVIFASQKKRKKMLHSINNQAGKYRARYQAALNLRREQSARLTGDNPLFPGSSKSPKHPSCTQTSLWHNQPGIKLCKARLTSHGSVDXESRVPNIEDDFIDKDSIAQWREFAAFQHGKALQAQRTNSNIRPLVPSMNICLAAIGTWDNGIKQFAAIGLKLAAHGHRVRLAANECFRPKIVALGLEFYPLAGAPDSVQDCAQLIHNAQLNTEAGRSGFGALQAFRELIYSLWPAAYGSDPHGSGPNKPGEHFRADALLWXPMLLGHIHVAQRLGIPLQCASLDPLSPTFEFPHVLSSLAGREAAAMMXPRYSNLLSHGVVDAALNHGSVADVLTQFRSFIGLTSGLDRPNPLVQWEVPHMYLYNPVMLPKPLDWGEELSVTGHVTLQDGLETQEIPRALTEFASSSSNEPVIYFGVSTRDLPFGAFEDLVRKIELAAQQLRMRIIVQDQEVGSTARSPYRSEFVYLVDTDLPYAQLFAHVTATIHWGEPDVLAEGLMAGKPAAVCGSHPSQLFIARLCQRVGVGIAPIDPTTCTIESLLSSFQQLLQPVIRTNAQGLVRSFDPDRAVDVAVDSFYSHLPLEAXVCDVDPRKLARVFDSQHTVKLSLEAYLAVQPVRDESKGFVPYKPLHYDGFCPPVFSICGNPGEIPRDVKPSRKLDAIGMALEVLNAQDERRSSELSQHSSDSSSGSIVAQVVDTEVFWSSTEQEEAVRKATNVAYERLVKPDGLRKRDKLAHMFSGKPKTGELQAVG

SEQ ID NO: 7807 - protein, 1296 aa, Aspergillus niger
MFASVLPERLRNDNDDDDDSQVDFSAPPGGMGPREGHMQYMHQSIFGMIAAVGSRSGFHARYDESSDSDGEDESRARKDAENLSATAGALPKRSGNESPRLSPKPQSPTPERGRRHRRTISDHKLLRPFKLNSKQNKGQEPAVQSEPQTGDEMSRASTPKRPRSVTPRAAPVLSRMVEARALLDTEDSTKGAPSTTEEIRDEGPTQKSASALSLRLKEMFGFEAPEKVLVEYACSFLQSMLLQGYMYVTEGHVCFYAYLPRKSTVAIKSGYVYKRGRKNPKYNRYWFSLKGDVLSYYADPSKLYFPSGHVDLRYGISASLAEPKDKGREVKDFQVTTDQRTYYFRADSSSSAKEWVKALQKVIFRTHNDKGSVKISFPIENIIDIEESPMVDFAETFKIRVVESEETYAIDEYYFTSFNYGQDAFNFLKGLVADTPMKRSQQTLSPQPEQTSRSRRTRGSQNRWSITSATSQSRGIGKSGNRRRSASTGQFSFGHDALKKTVRRHSDETARSVHTTRNGPEIQYAVSESDRDTQTPSGLHPSTPALNELVRAGVYPLQRAAGFAEYLKTRSKQMSNLLASESMGYLEKVSGMWAGGGKHYGESENILPDDQAVDPEDLEAGCKDGDRFREHFALPPSEKLQASYFAWLHRMIPLYGKIYISQKKLCFRSLMPGTRTKMILPLKDVENVDKEKGFNFGRHGLVVVIRGHEELFFEFGTADTRDDCAVTLHKGLESTKFLMASGLLAECEEKDESESATAEHRLLQEARLDITGMHSSRSAMAASNELHPIFDDPRASIINFKPTESLRITCLTIGSRGDVQPYIALCKGLLAEGHRPKIATHAEFEPWVRKHGIDFALVDGDPAELMRICVENGMFTYSFFKEATAKFRGWIDDLLSSAWKACQDTDLLIESPSAMAGIHIAEALRIPYFRAFTMPWSRTRAYPHAFAVPEHKMGGAYNYITYVMFDNVFWKSVAGQVNRWRKKELGLKATGLDKMQPNKVPFLYNYSPTVVPPPLDYPDWIRITGYWFLSEGSDWTPPAELVDFIQRARKDEKKVVYIGFGSIVVSDPSALTRTVIESVQKADVRCILSKGWSDRLGDPASAKSEVPLPPEIYQIQSAPHDWLFSHIDAAAHHGGAGTTGASLRAGVPTIVKPFFGDQFFFGTRVEDLGVGICLKKLNVTMFSRALWEATHDERMIVKAHKLGAQIRSVSWIQLGDVDLLTIDQEDGVDTAIQAIYRDLEYAKTLAQARSNVSSTPFSPTPSAKTVAEQEADEDVPEEEWTIVEDDTELEMRPTVA

SEQ ID NO: 7808 - protein, 716 aa, Rhizoctonia solani
MHPNRRDSAFSHTGGSQRYNSYHELPVPTSSAASSVHNSPYSATRSFESLAQATIQPPPPPLYTRHDHGSQAGPSEPRPSFHSHSSSTSEFVAHDQDLSVLPGYTQLDAKTAVSEDGRLTISFGNRMSKAFPDSYGAPVHEVGIDETGFRCAPRMNINIMIVGSRGDVQPYLALGKQLQQYGHEVRLSTHETFRKMVKDAGLKFYNIGGDPHELMSYMVRNPGLIPGLESLRNGDIGKKQKMVAEILEGCFASCFAPDLGAGEETGFAADAIISNPPTFAHIHCAEALGIPLLLSFTMPWCPTASFPHPLVNIKQSENTEPKMANYYSYSLVEMMTWQGLGRTINKFRMKRLGLDYLATASAVGMIERCAVPWTYCLSPALVPKPGDWMSHIDVVGFYFLDLASDYSPPQNLVEFLKAGEPPVYIGFGSIVLQNPQEMTKAILSGIAQAGVRAIVSPGWGGLDEDLIRSAGPHVFALGNVPHDWLFQHVSAVCHHGGAGTTAIGLKCGKPTIIVPFFGDQPWWATQIARRGAGPPPLDSKKLTAESFAVALRIALSPATMRAAEAVGETIRRENGVQNGVDSFHKHMPLLNMRCELDPTRVAVWYSPTHGMRLSAFAAQGILGAAAGVGKGTLSATTKPLAGVLQFISQPLEGTAKDVRSLFRKEVGKERIAARYAEGVLAVRKSSQKEKEMLVQTFIEHRGRMKMAGKGKDRAVW

SEQ ID NO: 7809 - protein, 222 aa, Oryza sativa
MEAEVASALVGTCMPCNQFVLSYQIVDSMIWLGIRDMINEFRKKKLKLRPVTYLSGAQGSGNDIPHGYIWSLHLVPKPKDWGPKIDVVGFCFLDLASNYVPPEPLVKWLEAGDKPIYVGFGSLPVQDPAKMTEVIVKALEITGQRGIINKGWGGLGTLAEPKDFVYLLDNCPHDWLFLQCKAVVHHGGAGTTAAGLKAACPTTIVPFFGDQPFWETECMLEG

SEQ ID NO: 7810 - protein, 825 aa, Rhizoctonia solani
MIVDDHLDKSTTRSTSHRSPSMKSSPHSFEAFTQTTSDQAPLPAYSRRTQSGESVLERGAPSIEGQYERDASGNHGKSLRSSKLDAEAAFQDDGRLQISFGDRWSKSLPRNYAEPVNEVGIDEVGFQDAPPMSVNIMIVGSRGDVQPYLALGQRLQSYGHTVRLSTHETFRKLVKDAGLRFFNIGGDPHELMSYMVRNPGLIPGFESMWNGDIGKKQAMVAEMLDRCYLSCYEADEGSPGERGFVADAIISNPPTFAHIHCAEAFGIPLLMSFTMPWCATASFPHPLVNIKQSGSHEPKALNYYSYTLVDMLTWQGLGHAINKFRSKTLGLDYLSTASAVSMIERCGIPWTYCLSPALVPKPQDWLSHIDVVGFYFLDLAKDYDPPADLVEFLCSGEPPIYVGFGSIVLQDPKEMTKTILEGIAQAGVRAIVSPGWGGLDETMIKAAGPHIFALGNVPHDWLFQYVSAVCHHGGAGTTAIGLKCGKPTIVVPFFGDQPWWAAQLAQRGAGPAPLDSRNLSSGGFAAAIRFALSPDTVLGAQEIGRMINEEDGTTNGVNSFHKHLPLLNMRCDLDPKRVAVWYSPTHKLRLSAFSAQVLADRGEIDMNKLKLHRSREYNTHALPTDPISGTALPMLRVVNGVVHGFIKIGSTRPDKGLVKMATATAGGLQTTLQGMTEGLTNVPKLYGSEVRESKKVTGVVSGLVEGSKGFAYGFYDGITDLVREPVRGYKEKGALGAVTGFGTGALNLAMKPGAGMFQIVSKPFEGGVKDIRGLFHKDISQHKIGVRHSEGILAVKQASQRDQDAVVQAFAARISRERKGKGKKT

SEQ ID NO: 7811 - protein, 428 aa, Unknown
  Description of Unknown: Pelagibacterium halotolerans B2 sequence
MTKRIAMATLGTQGDVQPYVALARAMIAQGYSVVIGTTDDFESMVTGYGIEFWSLGPSMQEFVKQSQFERAMNQNLLVNAPALLRQGQKIVDRAARSAWDMAQGADCIMLNMNTSFSIDIAEALDIPAIVAALQPLNSTSEFPLCIYYGPTFGKTINRLTYSTMTVQQIYYNLPRNKLRRELMGLGPRKNGGFFKDTDGTPLWTLNAYSEIISPRPRDWPKTSIVTGYWMLPDNSGWQPSEEFKTFLDKGPLPIYVGFGSMPWGADRNTDILREALTMWNGRVVVGRGWGGIKPDDLPADRVYVIDRAPHDQLFKYVKAVVHHGGAGTTASGLMLGKPTFIVPQMVDQPYWGGRVHEMGCGPKPVRRRKLTAEALADALSQLDSNPGFARNAEKIGEQLRAEDGTGKAIKVIERVMANYQPRSERKLA

SEQ ID NO: 7812 - protein, 1462 aa, Clohesyomyces aquaticus
MASEERSRDRIGRKLTKKRKEPRRVSLDIPERFKDGDDAHEDVTAPKTKDGMSMNQSIFSIIARAGQQSQTNLGTMREVDSGDSDDERRPTADFHSLDGAARLSRLSTANDFKAPTQNDGEAKGSGSKHRRALSENKLLRSLPKLKMSGRKDNRRDSIATADRMSSSQILPPRPSADESAGASQDEQLASQKLRITPGQEIHVEKRRHSISHRSRHGSTAGGSKGKGAVTLASRLQQIFEFEALEEVISEYPCWLLQSILLQGYMYITQRHICFYAYIPKKHHDVSKTGYLSKRGRSKYNRYWFILRGDVLSYYTSPSDLYFPRNRINLQYAISAEALEPKDKTKDETIFVVNTDERIYQFKADSVASAKEWVRSIQKVIFRTHNEGNSVKISLPIQNVLEIEESTVLDFADTVKVRVIDNDETFAIDEYFFSFFSNGQDALNVLRIMINDNDHHHEPSNRTGLTAKSPANASGSGQAEHAISSETPKDAPHIKENVRATLSPLPAPYVGRVSGESGRSSLDANRRSFDVRRSMDLSRSIRRSSQEVRRSFSGSRRDGPSRSRPGDRSPLSAKPQDSSESATNSFDPGTESSVAVQSMDESNASASQILGRSDVFRGPAIHTSGVPASDNSARQSQDTTRSSGMGKTHLTSPRISNRNHRGSSGNAHSPLGAPDVEDDSENLQTNAPLSTSSSALQDLASYPLQKASGLAGFLRTRSKRMGNLLATESMGYYEKVSGMLAGGRKHYNTMDSLEPDDRVHGVEEDEDAAKAAEHFREHFAFSETEQLQSSFFASLQRVLPNYGKIYISGRYFCFRSLMPTSKTKIILPMRDIENVNKEKGFRMGYHGLAVVIRGHEELFFEFSKAEFRDECAITILRILESTKYIEENESSSSDLDSDDEAAKAEHDLLQAARDGPQTTVQPFPADISQITRGADHDRIPLIFDDPLASIIDFKPPESLTIVCLTIGSRGDVQPYIALCKDLLKEGHKPRIATHAEFEPWVRGHGIDFAPVDGNPAELMRICVEHGMFTFNFLKEANSKFRGWLDDVCSSSWKACQGADVLIESPSAMAGIHIAEALQIPYFRAFTMPWTRTRAYPHAFFVSEKKMGGAYNSFTYVTFDKIFWTAISGQMNMWRRRELGLQNISQNKMQANSRPFLYNFSPNVVPPPLDWPDWIRVTGYWFLDEGDRYEPPADLLAFMQKARDDGKKLVYVGFGSIVIDDPARLTKTVVDSIIKADVRCVLSKGWSDRLASKDASKPEIPLPPEIFQIQSAPHDWLFKQMDAAVHHGGSGTTGASLRAGIPTVIKPFFGDQFFFAQRVEDLGVGVWLKRVNTTMLSRAIWEAANSYRYIIKAKVLGQKIRQENGTQVAIQTIYRELDRAKSLIKKHSKRDEDTDELDEDWTMIEDYDEADIPQPFEITQAVDGVNTVAVDTPRMGGGSLALGSMVLRGASTSRRASGSPFRDE

SEQ ID NO: 7813 - protein, 418 aa, Thermomonospora curvata
MPRKIVLYALGSRGDIQPCVALGRALNARGHRVRVIAAARYADLIASAGLDPAPLSVDPADLLNTEEGQRLLAGGRNPVAFLGGLRRVLGPLAERLLGEILTAARGADLVLAPSAGWLGEHIGEHLGIPSAVIHYQPSHPTGAFPHPLLPQARLLGRWGNRVSFQAVDLLAWVLIRHFVNPWRRGQLHLPPASLLGLPRRVYRERPVLCCFSSAVVPRPRDWPSHVHLTGYWFLDEPEYRPSEELAAFLEAGPPPVYVGFGSMVPADPQSAHRLIHDAIHLAGVRAVVMGDPKSGLTSGEDVLVVEDVPHSWLFPRMAAVVHHGGAGTTAAGLRAGVPTVVCPFFGDQPYWGERVAALRAGPEPIPFRKLTVRGLAEAIRQAMHDPVIRLGAEHIGRRLSAEDGTAAACEVIESLLPG

SEQ ID NO: 7814 - protein, 1047 aa, Claviceps purpurea
MASVNHQAAPASSGNSTTQQDAADTTLASTSQFPGKLDIPSQSVASSNMRKQSAPDPTASHDGSLRRPLVLERWQTATYDDGREHAESIPSRAWIPLDGNMGVVGGGYDTDSSSSDEQDIEPGAGDRDATKVRSKLSNCTSAHSAKPHRKKEGHKSKTKHKHRPNTERTRSDGRLRITVHETAHTGYLANALGAVAHSMRPKPLPTTRPKVRRGISTPQPRLNIVIMVVGSRGDVQPFLRIGKYLKDEFGHRVRIATHPIFRELVEKDSGLEFFSVGGDPAELMAFMVKNPGMIPTLETVKAGEIGKRRDVMAEMFDGFWRSCIHANEDERTNQSKPPSTVDGRHVFIADVIIANPPSFAHIHCAEALGIPLQLVFTFPYTPTHAFPHPLASIKQSNVDQGYANFMSYPLVEMMTWQGLGDLINDFRVQTLALDPVSTLWAPCANYRMHVPVTYLWSPGLVPKPEDWGEEIDVSGFVFLDMASSFKPPKALVDFLEAGEPPIYIGFGSIVVDDADRFTELIFEAIEKAGVRALVSRGWGGFGRDEAPDNVFMLDNTPHDWLFPRVKACVHHGGAGTAAIGLKCGLPTMIIPFFGDQYFWGTMVGKSGAGPDPVPYKHLTSDKLAEGIKYLLTEEAKDAAGKIAEDIEKDGDGAQNTVTTFQENLKLYGPPSMRCAILHSEVAVWQVKRHHVQLSARAAHVLVTSGQLAWKDLRLVRHTEWADFDGPGEPVTAVAETVKNTLRDIFSGIGSAPYRLGKTAKRRIKHKMKSSKDKKKKRESDEKGSQELTRQPSEVPGPDQYGRDLTMSVGKTVLAIATAPASIFVALAQGFHNAPRLYGDDTVRRPTRVSGVRSGLVASRREFVYGIYDAVTGLVYLPLRGARNEGAIGLLKGAGMGIAGLVLKPASAIVGPIGFSMQGVVKQIHRRHSPQNFIRRARMALGESQVQAMDTTAATALQEEVLTGWKVLQDLTRAIADEEHKRGLAGQIDKMTLDVAFLFLSVDRAKTCLADLRAGKSLDDITTGYKEWNTKSMDLGYRRNNTAPVQEK

SEQ ID NO: 7815 - protein, 1141 aa, Rickenella mellea
MSRTASLATVRLKRRAKLAEKLKDIFGLSAIEEVVAELPCWLLRSILLQGYMYLTNSHLCFFAHMPAREDQVLKSGSLNKKTQRTKRWVKHWFVLKNDVLSWYQSSSDPYFPHGVIDLRYAISCETVQEKGFRIRTNQKVVTLMADSAPSREEWVKAVRKVIFKAQNLGDSVKIAIPYTVITDVEKSSAMDFSETIEVKVSEKDDASTDSYFFAYFHNISLALDQIRDAVRTYKPTMHIPGAFEEVVHDTTTHKVLSPGSERAMVPPSIDSHRSSYSSKLASLLRFSSDSAAAHPTGVRTAPDSTNPSRSALSPSLSGTSLPPTSISVNDVGTIRPSDSYHTYPPAPSPVNISPVQSRESVISSWSVPVPSWLKVPSKRVFASPFSPSSSATEQGVQEVVSPLTPSLAFPSNNAGNASTELGYSVLETKDAAEPEMIEKFRTAFAFDEKEPLLGYFPGYLFRLLPTPGRLYVSTNFFCFKSSGPLATRTRMILPIRDILALENSKAYRFGHQGLVIIIKGHEELFFEFSSLERRSAFFNLLQRQLEEVRSRPVTGEVLKISEEKRDALVLEELEPSSILSDEDPRPPPETLTDSLPAVMFTSKSSTFLTFKPQKSLRFTFLTIGTRGDVQPYIALAKGLIADGHSCKIATHGEFKDWIESHGIEFGYVGGDPAELMRLCVENGMFTVSFLKEGVQKFRSWIDDLLKTAWEACQGTDVLIESPVAMGGIHIAEALKIPYFRAFTMTWTRTRAYPHAFAVPERKMGGGYNYMTYVMFDQVFWRGTAGQINRWRKHMLGLSSTSLDKLEPHKVPFLYNFSPTVVPPPLDWPEWIRVTGYWFLDDADGGSKKTWSPPDGIVEFIDKAHNAGRKVVYIGFGSIVVSDPDAMTRCVVEAIVKSGVHAILSKGWSDRLHVKKSADVFEPEIPLPPQIFPIQSIPHDWLFKRIDAACHHGGAGTTGASLRAGIPTIIKPFFGDQFFWADRVEALGIGSGVRKLTVDNLTEALAYATTDAKQIARAKLVGEQIRSENGVATAVEAIYRDLEYARSLIKPGRSDDSSTSDEDVKSPHEKQRKRRSSQSTPDRLHSSDSNHGAPSEDWSVISDQESSRFSASLDRSPSSKRNSLAAAVMSVLPTSKSRNATP

SEQ ID NO: 7816 - protein, 993 aa, Aspergillus luchuensis
MPHQDGPTADDWPDEHIAQQTTNSAGHGRTPRRAHYHEKGLNTGVRVMDDGRLDIKIRERKPWVSKIIKHLQQQPEPLREERKPSVCLVEDGKPPCALKLNIVIQVVGSRGDVQPFIALGKIIKSHGHRVRLATHLAFRESIEHSGLEFFDIGGDPAELMAFMVRNPGLMPHMSTLRSGAIPRRRREMKAIFSGCWRSCYETGDGTGMHHIPDDPWSETADYRTMPFVADAIIANPPSFVHLSCAEKLGIPLNMMFTMPWSATQSFPHPLATIRTKNTKPSAANFASYAIVEILMWEGLGDLINSFRKRELGLDPLDAIRAPSIAHRLRIPYTYLWSPALLPKPGDWGDNIDITGFSFLSTASDYTPPDDLANFLESGPPPIYVGFGSIVVDNPGSLTKKVFQAIRESGQRAVVSKGWGNLGADEDEIPENIFMIDKCPHDWLFQHVSCVIHHGGAGTTAAGLVLGRPTIIIPFFGDQPFWGSIVARAGAGPLPIPHKQLTAEKLTKAIKQALEPETLEKAKEIGRDMRKERGVQNAAASFYQHLDVQAMRCSICPNRPAVWWVKHSHIKLSTFAAAVLVETGLISPRNVVLYVLCSLSLVHPGSVTNGGCRYRSREYDTNRDPRGPLSAGAEVLYGIVSDFVTSIAEAPSGMRGIFSTTHERRLHHKHDWKKELHLSYLDKSSFHRHRRGRTETSLDSGVGADMIPNGDNQHSVTADQNQYENGERASNENSRGSIESDEAYHSAGEDINRDQAIPDRQQNVDGATNSPSGGESSSPHTSSSDTETFDTTDDDMGAELDLERTITRLRTREMSHTKEILAETSYHSAHLTLSLTKGFHNAPKLYHDTLVEDSPRVLGVRSGFRAAGTEFTHGFYNGITGLVTQPVVGIEKSGAKGLLTGIGKGVGGVFLKPTAGLWGLAGYPLEGMHKSLRNSLSKSKTKDILASRMQQGIEEMCAATTQERSAVIQKWHDLQRAGLGHMSEREHEHGHHGS

SEQ ID NO: 7817 - protein, 680 aa, Coccidioides immitis
MCHRVSVTYCVFSGQARSRRLLVSLSGQSVKKPVQNVTGDKRNIHSQSSFFRNFLARLTLFVVPCVLYLPPTISAYDSIMDNASVFYPFHVQYVLAAMRAACPARKRDADNGGSEAYEMSLMTPFFLTYRALDAAPAVAYYELDFRASNLSRRAARSLDDHCASSESLRITCLTIGSRGDVQPYIALCKGLLAEGHKPRIATHREFEPWVRQHGIDFAPVEGDPAELMRICVENGMFTYSFLKEASLKFRGWIDDLLSSAWSSCQGSDILIESPSAMAGIHIAEALRIPYFRAFTMPWTRTRAYPHAFAVPDHKMGGAYNYMTYVMFDNVFWKAIAGQVNRWRKRQLGLRGTNLDKMQPNKVPFLYNFSPSVVPPPMDYGDWIRVTGYWFLDEGSSWSPPEQLTAFIQKARNDRKRIVYIGFGSIVVSDPTALTKTVIESVLKADVRCVLSKGWSDRLGDPSSAKTEVPLPPEIYQITAAPHDWLFSQVDAVAHHGGAGTTGASLRAGVPTIIKPFFGDQFFFGTRVEDLGVGISLKKLNVNVFSRALWEATNSERMIVKAKLLGEKIRKENGVEKAIQALYRDLEYAKTLVRRRSIAAASPPLPVPLGSPKARHDWEDDLAGIEDTWTLVGHPDIDMELSQSSKGRESEFDLRASAALATGTLPDIVVDEDDGEEDVTR

SEQ ID NO: 7818 - protein, 599 aa, Vigna angularis
MADLPEDSRNSSHSSNDHGNGKGMEDSVHSAANGTSSSASDIPGKVLSKVTTMPVDISHGDKLESSSSKFRMERSKTERLRHLSPEDAAQIFDDKIPVQDKLKLLNRIATVKDDGTVEFDVPVDVEPEAIVTQSTKVNHVVDDSLDATDFHYIPPLNIVMLIVGTRGDVQPFIAIGKRLQDYGHRVRLATHSNFKEFVLTAGLEFYPLGGDPKILAGYMVKNKGFLPSGPSEIPIQRNQMKEIINSLLPACKEPDIDSGVPFKADAIIANPPAYGHTHVAEALKIPIHIFFTMPWTPTTEFPHPLSRVKQQAGYRLSYQIVDSLIWLGIRDMINDLRKKKLKLRPVTYLSGSQGSETEIPHAYIWSPHLVPKPKDWGPKIDVVGFCFLDLASNYEPPESLVKWLGDGDKPIYIGFGSLPVQEPKKMTEIIVDALETTGQRGIINKGWGGLGNLTEPKDSIYLLDSVPHDWLFLHCKAVVHHGGAGTTAAGLKAACPTTIVPFFGDQPFWGERVHARGVGPPPIPVDEFSLPKLVGAIEFMLDPKVKERAIELAKAMENEDGVTGAVKAFFKQLPQKKSDADAEPQPSSFFSLRRCFGCS

SEQ ID NO: 7819 - protein, 1518 aa, Valsa mali
MDFPEQLKQKDGEEDQEEDVLPVGLGHSNRPFMNLNQSIFGLIAAAGPKVDFHDRFEGHSSEDEAEDSDGRRRSKDGTTDPMAQTTILSKPSSKTNDNHRRKFSESKLMKSVPILSRLSTKSRSRKDAKKPVLQIQEESEPESPAWDAPTTSLTNDENRLAPVMSRMLEARAEVSARPSFDLERQSIDKGGEPLDLTNLTDLTQTGPSELSKRLQKIFEFDEPEELISEYPCWLLQGVLLQGYIYITCKHICFYAYLPKKAVSHVEPDPERTSLTIYQHEVTKSGYLSKSGKRNPKYNRFWFRLKGDVFSYFRDPSNLYFPHGQIDLRYGISASITDKDKDGVHFSVETDHRTYHFRADSAPSAKEWVKCLQRVIFRSHNDGDSVKISLPIANVIDIEEAQMLELADTCKIRVIDNDETYAIDEVRQMCGRDCQETSEMATNLWQYFFSFFSFGKEAIGILKILIEDYASRDHDDEAKKLDLPLSVGQNTAATATSSKQSSHSGDRSRPVTPPRARPSKLQGNVKATLSPMSPQSPTCLSPRASGEYLRKSYDAIQQFGRRSTDMNRIDFRRRSFSREGRSISRQGNSDRISGPDKHCSVDSYAESTEDPSIASLSAMTTSAEMEQSASQILRGSDVFHSPTVHRSASASRGKERERPRSPHRHISTGSLGAHFRSHHAATTGHVTDPSSGEHAEPTPSTPTLQTISKMGTYPLQRVGAFAEYLGRHSKRMGGLLATESIGYAGKVSGMWKGGQRHYDDPHALRTDDEDDDEEQVKIAEERFQAHFALPKSERLRATYFGYFMRVLPLYGKVYLSERNFCFRSLMPGTRTKLILPIRDIENVTKSSGFRLGYAGLVVVIRGHEELFFEFGDTALRDNLAVFLLKGIETAKSLRDFQGMDSEEQEEAEHAVAEHKALEKARHEEFPEHELTLPRQTASVSDGPTIIFDDPKASFINFKPEKSLRITCLTIGSRGDVQPYIALCKGLMADGHKAKIATHMEFKDWIEGHGIEFAPVEGDPGELMRLCIANGTFTVAFLREASSTMRTWLDGLLASSWRACKGSDVLIESPSAMAGIHIAEKLCIPYFRAFGMPWTRTRAYPQAFMMPERKMGGAYNIVTYILFDAVFWKATAHQINKWRNKTLGLPNTSLEKMQPNKVPFLYNFSQHVVPPPLDYSDWIRVTGYWFLNEGGENWTPPQDLVDFIDKARKDNKKLVYVGFGSIIMDNPSKFTREIITAVLKADVRCILSKGWSDRLDPKSAEAQEVGVAAIGGSDGKEGLMEIPLPPEIFSIKSAPHDWLFKQIDAAAHHGGSGTTGASLRAGIPTIVRPFFGDQFFFGGRVEDLGVGILLKKWGVNSFARALWEATHSERMIVKARVLGENIREENGVDTAIQCIYRDMEYAKSLIEKKAGKNAAAAERAATSGSDGDLDDDVEEESWTFIGDDAGPEDDGDVDIDAIMKRSQILAGFTDITRSQTLGNKSLMRSNTVLSIGSSSMPGQRSPVPSRSTSNDSAKLTDMGH

SEQ ID NO: 7820 - protein, 1836 aa, Sporothrix schenckii
MAPPRDPAAPTAASSTTPTPTPTQTPPLSTAPSDASNRNTNIDTTTSSTATLQAPPVAASASSSPGPSRTVAGTASPTTPSTNRNDHQRKSHSHSLRLSSRLSAQSPSTSALASALASSPTRLSNTSPRQSEDDAGRHKPKKLVKRRHDGGSQRTPKAMDFPERLKQSDDGGEEEVIRPVVSGNGAFYNMNQSVFNMLAAAGSNIDFNNRFGDHSSEEDDEDGGDAEGGDGDVAQRRHFSSDGAATTVLPAAGSQKKSGKKPAKDVSQSTIFTRNTSSTGKDGKDGKDSGRRSRFSDSKLMRSLPSLKQKLSSSKRRSSSGLSSKSSKHASAGGTSDSRILEEDEDADAEAESSHTPSSTQTRLPRGSGATSDVDVAVGSARGSNHSPSIQVTRAERSNSVRSIPVMSRMLEAKELASLRPSFDIDRDRKSSDKDKGDGVDVEDGGPSALSRKLMEIFEFDKPEEVIEEYPCWLLQSVLLQGYMYITSRHICFYAYLPKKANEVAKSGYLAKSGKRNPKYNRYWFRLKGDVFSYYRDAKNLYFPHGQIDLRYGISATVSDQDKDGVHFQVVTHHRTYFFRADSAASAKEWVKSLQRVIFRSHNDGDSVKISLPIENVIDIEENQAMVEFTETCKIRVIDNDETFAIDEYFFSFFDYGKDAVRVLKILIDANNVNSNDNNNNNNADSDNQSGQGTPSRAYGRRLDLPSAGQGMDDRVSQDSTGSVAFGAGQERMSMSKPPSKLQDSVRATLLSIPPTAASSPRASGEIPRTSFDALRSSFSPTRRSLDTSQVLRANPPRRSFSDRIKGAAGDTVQRKISQRSTSAAQPQSSDPQDSTDSFMQSSVEDPSQISFSNMAASSSDDPSASQILHGSDVFQSPTFDAGSPHSAGPPPSTSRPAAAAAAAAKPPPHHSATTGNIRKFKGAASDEAGENEEGLAQNLARLGTYPLQRAGAYAGWLNRQSRRMSTMLATESMGYVEKVSGMWKGGRQHYDDASLTPHADAGMPDGEPGMSVADAIVSNEHFREHFALPDTEKLEATYFGSIMRVLPLYGKIYVSQRYFCFRSLVPGTRTKLILPLKDIENVVKEKGFRYTYAGLVVVIRGHEELFFEFHQAELRDDCAITLLHLLDRFRSAKESGVLSDQDKADADVALAERDALKEAREEAAARMDDHAETPAESTAAAVATAKAVAASSEAKAERLNRKILRQSALMSEAPTILFDDPKASFLNFKPAKPLRITCLTIGSRGDVQPYIALGRGLLAEGHHVRIATHPEFEGWIRSHGLDYGRVAGDPGELMRICIENGTFTIQFLREANSKMRTWLDELLSTAWTACQGADLLIESPSAMAGIHIAEKLQIPYFRAFTMPWTRTRAYPHAFLMPERRMGGAYNQFSYAMFENIFWRATAGQVNRWRNKTLGLRNTSLEKLQINKVPFLYNFSPCVVPPPLDYSDWIRVTGYWFLDEGTNIKKANNNNNNNNNNNNNKSSSEPEGKEVAEAKEPAWTPPQDLLDFIAKARKDRKKIVYVGFGSIVVADPAKMTQEVIDAVHKADVRCILSKGWSDRLVAKKDDKTEAVAEAEAEAGAEAGAEAATGRVMHADPPEDVLPAEIFPIKSAPHDWLFAQIDAAAHHGGSGTTGASLRAGIPTIIRPFFGDQFFFGMRVEDLGVGLCLKKWGAMSFARALWEATNSERMIRKAAVLGEQIREENGVDTAIQSIYRDMEYAKSLVREKAAKSGMLRSGGGTERADRNDRGHGKHINADSDEEAYDDDDVDDDDEPEESWTFVGDDDPMQQSVILTPDAGRASGDDGVVQPASSGAGGSSGGYKALGSRILGIATAQKQ

SEQ ID NO: 7821 - protein, 435 aa, Xanthomonas fragariae
MVIAVLGTQGDVRPIVALGRGLQERGYPVRVLTSSNFEALIRANGLEFFPLSGDHWKLLQGNPEVANMHGSRRAVWNIWRTHLLMWARDWAAQGRAACADAGLIVGVGSVSFLAHSLGQAYGVPMVFAHLQPLTVSRHLPSMVAPNLRLPGLVSAALQHMARFACWYLIRPVLNELVRPALGLTAYPWNGPDRSAMRVLYGYSAHLCPRPPDWPKSVQICGFWQLPQPQWQPPAALQAFLKAGPPPLYIGFGSMTSSDSAQLTATVKAAVRLTGQRALLASGWGGLAAGEAAADDDAERFFHLEQAPHDWLFPRVAAAVHHGGAGTTGAALVAGVPSVVLPFGYDQPFWAHCLAQRGVAPPALERAGLQPETLADAMRQASAPAMRAAARALGQRIAEEDGVSRAVDQLEAWRLLEPAVAVTPVARIEQHAIAMG

SEQ ID NO: 7822 - protein, 1477 aa, Cryptococcus gattii
MSPPTSPTSCSLQPPFPPSATAPHPNPPSQHQQAVESLVNAAAQHVAPTCPPTSDESPQMADQAANSADDSLISNRQVPEQEQTETAIIPGTPLDEMEPAKDARAVQFSSSSPASTHEYQAETTARLNEPLTSSRAPSTGSSQIDEWRRPDFGASRDIGSEDDESDDGEDDDEFTDPAGGTSLAVYERKKRPQLPSTSHGSHPTHPIHFPFRQNAIARRARPPGTTELDYQYATSETSTRGMSETGSESSSEGEVPLPKGFVSPPNLIAPSAEGEATGPPDPKLISDRIKKEQQIADEEEQVEILRSSKEQEMRLGKEFVPGKSRGSAELNVDAALREGGSEGEDVIEEQMQTNEAEESLTRKEKLAERLMEVFGLEEREEVLEEMKCWMLRSIMLKGYMYLTKRHICFFANMPNENFWVVLKNDVLSWYENTSDPYFPKGNISLQYCHSCEAASGTRFKVRTSERNYTFTADTESSRDEWVKAIQKVMFRTQHEGESIKLIIPLEAVVDVDKSPTLEFTETIEIKCIDAEDQMSIDSYFFASFPNNDHAFSAIQKLVRERPSPPEVPRVSSATTIHVNQEPLDTSHATITRSGTDSSAEKLGMASHLPFRKFASVLKPLISKSSDGEPHEELSEDNHQDDHEASHLPHAEVTSNRQRSEEESDNDDFDGYPPRQVGPPPPSMNDDARNWRPSWIRKPASKLFGSSPSGSFVSSPGRSPMDSSTTVTETGPSLRTRAGRTKQSSVTEVLEPPIQHEEEVSEDEVPTKPSVVDSNSAEAARKRAASLSWTSETSSGSQMVKSKSDFSMLGSESGHSESAETLRKFRTFFALSDKEDLIDHFPGYLYRMIIPIRDLYGVKAQKAFRFGHSGLTVVVKGHEEIFIEFRSASRRKACITLLEERMEAVRLSGENNTIDSRKVEVRIMEDLDESTPIEPKSPWPVSSSPLFGSTTSTSFLEFKPEPMKITCLTIGSRGDVQPYIALCKGLQAEGHTTKIATHGEYKEWVEGHGIAFESVGGDPAKLMQMCVDNGMFTVSFLKEGLQKFRGWLDDLLNSSWEACQGSDLLIESPSAMSGIHIAEALRIPYYRAFTMPWTRTRAYPHAFAVPEHGRGGPYNYMTYTMFDQVFWRAISGQSGFMSLDTGSWIKRTRSRGRRVGHLQKASRTSFDNAHGEKKKVVYIGFGSIVVSDPEEMTRCVVEAVVNSGVYAILSKGWSDRGSKRGEPKGDSQGADGVKYPPKIFAIDSIDHGWLFPRIDAACHHGGAGTTGASLRAGIVSRNDCKNPTIIKPFFGDQAFWAERVETLNVGSAIRRLTSQQLAAALIKATTDEKQIFKARVVGEMIRKENGIARAIEAIYRDLEYAKSIIKTPSSTDEKTPEKISSLLHPLITADLGVRRVRSRSRSRSSHGRFSPRRHPVDDDGWSVVTGGSRSRSGSASAVASPERRSLNIGSALGSHVFKAPLLPNPFGKWGGSEGGDDR

SEQ ID NO: 7823 - protein, 625 aa, Gossypium hirsutum
MAASPEHRDDSSSSSPVEVPVKKELEICVDAKQIDSDGGSREAASGDNSRAEVDFALNNGAAEPYSIVHRSFSEVGTLRVGTSNIEKLDSSQPKLVKSKTEAPRHRSILAEDAAQIFDNKMSAQKKLQLLNRIATVKDDGTVEFEVPVDVEPHVLACGLRDEHIEVAEEESPEADIQCIPPLQVVILIVGTRGDVQPFIAIGKRLQEYGHRVRLATHSNFKEFVLTAGLEFYPLGGDPKVLTGYMVKNKGFLPSNPSEIPIQRNQMKEIIYSLLPACKEPDPDSGIPFKADAIIANPPAYGHTHVAEALKVPVHIFFTMPWTPTSEFPHPLSRVKQPAGYRLSYQIVDSMIWLGIRDMINDVRKKKLKLRPVTYLSGSQGSDSDVPHGYIWSPHLVPKPKDWGPKIDVVGFCFLDLATNYEPPESLVKWLEAGAEPIYIGFGSLPVQEPERMTQIIVNALEQTGQRGIINKGWGGLGNLAEPKDFVYILDNVPHDWLFLRCKAVVHHGGAGTTAAGLKAACPTTIVPFFGDQPFWGERVHARGVGPPPIPVDEFSLPKLVGAIKFMLDPKVKEKAKELAKAMENEDGVTGAVKAFLKHLNHKKPESEPSPVQSGLFSISRCFRCS

SEQ ID NO: 7824 - protein, 1491 aa, Rhizoctonia solani
MESSASPPNSIQNPVHGTTIDTSPGELGLSQPQSLSAMSESHDSSDDSDGGKGILKRTVEKIGRSTSLSRSKRHPDADSRTHRRLFSLSRHKGKDKAADEVTGILGGHAAGDGSSDADVSLQKSRTPTNSSTKSSPRVTRMAATTSDLRRNKNQASDSRPSLSIMGLGKQDEFGIGSMRMGTQALIQALQAMPWDDDRDDEATEAAARRDRGKARREAVSPDSSDEEEQAKADFVLASSIHTIHRPVAHSRLATPSFNQSIHYGTNPPFEIAEDYFSNPLSTDEDDGLRDFDEATPQESLPDPFKGPQMRLQLPADKLPKSEGKRRMPPTMRTASMATVRMKRRSKLAEKLKEVFGVPEIKEVVAEMPCWLLRSVLLQGYMYLTNTHLCFFAHMPTREDQVLKSGTMSKKAQRTKRWNKHWFVLKNDVLSWYQSSSDPYFPHGNIDLRYAISCDAHREKGIRLRTNQKTITLQADSVPSRDEWVKAIRKVIFKAQNMGESVKIAIPYSVIDGVEKSSAMDFSETIEVKVIDKEENYALDSYFFAYFRDLPAALAQIQQILLDYQATTPAADAHLTDTTQINRSPQQQHLDRTTSAPASSHQNDSSSGFRISSLLSLRPFSTTSGNDEAHKGSSMIASRSSEGVSAQRDPVSPENAAFGSTSILSEASAHTYPPSPSHQVPPSTHSNRTSISSNWSVPGYNWLRGKGVFSTPSSIDWGSRSTEGNVSEVISSPRLDQSELSVSSEGHNLGYSMLEAADESKIAHAALQEKFRSTFALDEKEELLECIPGSLFRVLPVYGRLYVSTNYFCFRSSQPLTRTRMMIPIRDILSTEKQKPFRFGQHGLVVVIKGHEELFFEFGSSERRDTCRSGLDRQKEALQKQALSPVSPTPTQGKRDALILEELEPSMLISDDDPRPAPEVLASDAPVMFASTSSTLLTFKPEKPMHFTCLTIGSRGDVQPYIALCKGLQADGHKVRIATHKEFQPWVEGHGIEFALVGGDPAELMRICVENGMFTVSFLREGVQKFRGWIDDLLETSWLACQGTDVLIESPSAMAGIHIAEALKIPYFRAFTMPWTRTRAYPHAFAVPERKMGGSYNYMSYVMFDQVFWRGISGQVNRWRRHTLRLPSTNLDKLEQHKVPFLYNFSPTVVPPPLDWYEWIRVTGYWFLDDPEDSSAKKWTPPPDLVTFMETARRGGKKVVYIGFGSIVVSDPDAMTECVVEAIKLSGVHAILSKGWSDRLSTKKSTSEPPPAYPPQIYPISSVPHDWLFERIDAACHHGGAGTTGASLRAGIPTIIKPFFGDQFFWSDRVEALGIGSSVRKLTVENLTAALRAATTDLKQIERAKLVGQSIRAENGVRTAIEAIYRDLGYATELFRKDTQVDLDADGSEDETIQESKTPAARRSSLDPVMIGSDSSCGSGRGNGEDSSWSVISDHPPPERVRVESTGSDKRAGGECGDDSMSEAQTSSAGQTKTSGSRAYSPSARGEPNGRQ

SEQ ID NO: 7825 - protein, 1466 aa, Endocarpon pusillum
MPTNEEPLKKRIGRKLSKKPKRLHRLPSSHVPERFKYGEDANEDVTAPARAGASAPQYMNQSIFSMIAAAGSRTDFNARFDDSSDSAEEDELGMEESAGGVSSQSSAARLSETSTTHPSNLDISPRKLSNEEKVHKRKPSEQRLLKSLPRLSLRPRKEKHSGTQQQANIGDEHSLDYSDKANYLTPRDAPMMSRMLEAQAELSASDLGTEATMRSDKVEKGRGQAGSSPATLLATRLMEIFGFEEPEDVISEYPCWLLQTVLLQGYLYITRKHICFYAYLPKKSASVAKTGYLAKRGRQNRAFTRYWFTLKGDVLSYYSNPADLFFPAGNIDLRYGISAFLCEDKDKQKTCKDFSLTTDHRTYQFRADSHTSAKEWVKNLQKVIFRSHNDGDSVKISLPIENVIDIEESPVIDFAETLKVRVVESGDTYAIDEYFFSFFSFGKDALDVLSSLVDHAATHNREASSPGSHGQHESRTASPEPRGSLDIRSSNTRFRSATPLRDSVKATFLPPPTPNSGRTSPRLSLDAGRSDKELKRPSIDLFRQEYGRASFDRGRRPGSQATTGRPSVESLTSQPPGGSDSFVQSMDRDTASTPIIHSPTTPTLESASQILNRSDVFLSPTISRLQDSHVRSSEDIRQTSESDERFASVAANIRQPSPSRTSHAKPAPHRALLQNDPLTSDTISRDGLQHKTSSPNLQDIMKAGSYPLQRAAGFAGYLKSSSTRMSKLLATESMGYLEKVSGMWAGGRRHYGEHEGIMPEDRLVDPEDEEAASGYGDRFRAHFALPASEKLRATYFAYLHRVLPLYGKVYISDRKFCFRSLLPGTKTKMILPLKDIENVEKEKGFRFGYHGLVLVIRGHEELFFEFNSSEHRDDCTVTLLQNLESIKYLVESGLLAQEDHDEAQVAKTEHQMLQEARQEGHAGHEMKLPGDDPKDAGTEEVPPILFDDPRASIINFTPTKSLSITCLTIGSRGDVQPYIALCKGLLAEGHKPRIATHAEFEPWVRKHGIDFSPVDGDPAELMRICIENGMFTYSFLREASLKFRSWIDDLLSSAWKACQGSDILIESPSAMAGIHIAEALRIPYFRAFTMPWTRTRAYPHAFAVPEHKIGGAYNYFSYVMFDNVFWKAIAGQVNRWRKKELGLRSTNLDKMQPNKVPFLYNFSPHVVVPPLDYSDWVRVTGYWFLDEASGWAPPLELVEFINKAHADGKKLVYIGFGSIVVSDPAALTKTVVDSVLKADVRCILSKGWSDRLGDPAAVKTEVPLPPELHQIRSAPHDWLFPQIDAAVHHGGAGTTGASLRAGVPTIIKPFFGDQFFFGSRVEDLGVGICLKKVNVSVFSRALWEAVHSERMIIKARVLGQQIRKENGVQNAIQAIYRDLEYAKTLINARTVGSKDARSGAVHNDDPAVDIEESWTFIGDESDPEIQKRIRDRDISTYKEPRASVDRSRPKAIEALKPSIAGKGSPE

SEQ ID NO: 7826 - protein, 561 aa, Genlisea aurea
QGLEYRTTTPPVQRNLFLTSQEFAISRSMTEKRFSSPMHSLNLDTLSENEKNNLIVNLVKIQNDGTVEVDLSKDSPVASELLELRSAEGIPPFDLLMVDNSDKPIPKLRIAMLVVGTRGDVQPFVAMAKRLQEYGHRVRLATHSNFGGFIKSAGVDFYSIGGDPRILAGLMARNKGLIPSSTGDLHAQRKQVQAIVESLLPACTEPDPVTGEPFKAQAIIANPPAYGHTHLAEALGIPLHIFFTMPWTPTYAFPHPLARVPQSAGYWLSYILVDLLIWWGIRGYINDFRKKRLKLSPIAYLTLYHAISQLPTGYMWSPHVVPKPDDWGPLVDITGYCFLNLGSKYQPSRQFDQWMQKGEKPIYIGFGSMPLEDSIKTTQIILEALEVTGQRGIIDRGWGDLGTDSDIPGNVFLIVDCPHDWLFPQCSAVVHHGGAGTTATGLKSGCPTTIVPFFGDQFFWGERVHQKGLGPAPIPISDLNVDSLAEAIAFMLKPEVKSRAMELAERIRNEDGVGAAVDAFHRHLPPEIPLPSPSPEEDDDSGPGPLQWLFGKIGRLCCLPC

SEQ ID NO: 7827 - protein, 1526 aa, Podospora anserina
QSSTMATPSQSTSSAVAVPIAPVEDTTAPSPAPTSSQSAALSKSQHLAHPPPSSAVRTPNAASHDERTVRRVSRKLQKKRHDDEHTPTMELPESLKQQGDHADSDEEVLRPQGYGGGMFMNMNQSIFGLIAAAGSQADFGDRFEGQSSDEDDNDVERENPMAMTIAGHKALHHKPSKSLSSHLAQSTVLRKHGATSNKVESKHRRKISESRLLRSVPGLSKLTSRAKSSLKPPKTQDAETEKPGEMDDKAEEASASQPASEVTPTIEITRTESRQTAPVMSRMLEARAQMAARPSFDLERPSGEQAHRPEAGETGPTELAKRLQEIFQFDTPEEVINGGNHAEFPCWLLQNVLLQGYMYITAGHVAFYAYLPKKANEVTKSGYLAKCGKHNPKYNRYFFRLKGDVLSYYRDTQNLYFPSGQVDLRYGISAEITDKDKEGVNFTIVTHKRTYYFRADSSSSAKEWVKSLRKVIFKSHNDGDSVKISLPIANILDIRVIDNDETYAIDEYFFSFFSFSEEAIDVLKTLVEGSSLQTPGQNELDEPASEAQSKRTSTSGSREQVLKSLNTRGGKITQSIKTTLSPISPGQRSPSPRPCLDGPRTSFDGFRPFSRRSVDVSRDDIRGKSPRRSFSERRTSFHRRHLSESGTDHDMERQEGSDSYVQSMEDPSQASMSGLIVSGSSEAPSASQILRGSEVFHNPAIHRSASAPRARNEPAVPEAPGTVKASRPPSISAQNGETEGNQAMPTLQNTATVGTFPFKGAGALMGYLDRQSRRMSNLLATESMGYVEKVSGMWKGGKKHYDEPAGLRTDEEDAEDNPDERATHEARFREHFALPKTEKLQAAYYAHMMRVLPLYGKIYIGNRHFCFRSLLPGTRTKLVLPLKDIENVDKEKGFRFGYAGLVVVIRGHEELFFEFNRAEIRDDCTITVLQNLEATRYVRDSGLLDSEDAEDAQAAVAERDALREARNEEFPHHEVKLPHDAHCVSEAPTILFDDPKASILNFKPSKSMKITCLTIGSRGDVQPYIALCKRLMKDGHRPRICTHAEFRDWIESHGIEFRPVGGDPSELMRLCIQNGTFTWAFLKEANSTMRGWLDDLLVTAWEACKGSDLLIESPSAMAGIHIAEALGIPYFRAFTMPWTRTRAYPHAFIMPGQKLGGAYNYVTYTLFDNVFWQTTASQINRWRNVWLGLPNTTLDKLQINKVPFLYNFSPFVVPPPIDFSDWIRVTGYWFLDEGDENKWQPSKELLDFIDKARADGKKLVYVGFGSIIVPDPAKMTQEVIDAVQKADVRCILSKGWSDRLPGSGDEKVPGPEEAKVEPQLPEEIFQIQSAPHDWLFKQIDAAAHHGGSGTTGASLRAGIPTIIRPFFGDQFFFGSRVEDLGVGICLKKWGANSFARALWEATHSERMIVKARENGVDTAVQCIYRDMEYATNLIRSKMGKNHARTGENVSMTEANLNNEDEEESWTFVGDSDTVEDLSSEALMKTVADLRDLQAYHGDNADKTQGNTVVGGAVGAGVETVKGKGVS

SEQ ID NO: 7828 - protein, 1233 aa, Rhizoctonia solani
  MOD_RES (1207)..(1215): Any amino acid
MGRNTSISRSKRQGDADSRTHRRLFSLNRHKGKDKAAEEVTGILGGHAAGGISNDADVSLQKSRTPTNSSPRSSPRVSRMSATTSDLRRNKNQASDSRPSLSVMGLGKQDEFGIGSMRMGTQALIQALQAMPWGEDRDEDLPESAAKRERGKARRERVSTDSSDEEEQAKADFVLASSIHTIHRPVAHSRLTTPSFNQSIHYGLNPPLEPAEDYFSNPLSADEDDGLHDFDDTAAPEGLPVPNPFKDPARMRLQLPADKQSKLEGKKRMPPPMRTASMATVRMKRRVKLADKLKEVFGIPEIKEVVAEMPCWLLRSVLLQGYMYLTNTHLCFFAHMPVREDQVLKSGTMSKKAQRTKRWNKHWFVLKNDVLSWYQSSADPYFPHGNIDLRYAISCDAHREKGIRLRTNQKTVTLQADSVPSRDEWVKAIRKVIFKAQNMGESVKIAIPYSVIDGVEKSSSMDFSETIEVKVIDKEDNYALDSYFFAYFRDLPAALAQIQQVLSDYQTTSPPGEAHLTDTTQAHRSEEPHKASSTITSHTSEGVSIQHDPASPESAPGASSILSDASAHTYPPSPSNQAPPSTHSNRTSISSNWSVPGYNWLRGKRLFSTPSSVDWGSRSTEGNVSEVISSPRLDQSELSVTSEGHNLGFSILEAAEDGKAADAGLEEKFRSTFALDEKEALLGCIPGSLFRVLPVYGRLYVSTNYFCFRSSQPLMRTRMMIPIRDILSTEKQKPFRFGQHGLVVVIKGHEELFFEFGSVERRDACCNLIEMQKDVLQKQALSPFSATPTQGKRDALILEELEPSMLISDDDPRPAPEVLASDAPVMFASTSSTLLTFKPDRPMHFTCLTIGSRGDVQPYIALCKGLQADGHSHRRIATHKEFQPWIEGHGIEFALVGGDPAELMRICVENGMFTVSFLREGVQKFRGWIEDLLETSWLACQGTEVLIESPSAMAGIHIAEALKIPYFRAFTMPWTRTRAYPHCFAVPERKMGGSYNYMSYVMFDQVFWRGISGQVNRWRRHTLRLPSTVDAACHHGGAGTTGASLRAGIPTIIKPFFGDQFFWSDRVEALGIGSSVRKLTVENMTAALRAATTDVKQIERAKLVGQSIRAENGVRTAIEAIYRDLGYATELFRKDTHVDLDGDESEDETIQESKTPAARRSSLDPVMVGSDSSCGSGRGNGEDSSWSVISDHPPPERVRVESIGSDXXXXXXXXXWRVANAECGPGIGIAWAF

SEQ ID NO: 7829 - protein, 409 aa, Streptomyces cellostaticus
MTAGSRGDVAPYTGLGHRLGRAGHEVTLVTHGCFEPLVAGSGVRFHALPVDPRTELESPRGRGLHRSTSGAGKLVRVVELARRLVGRMTDDLVAAARESDVLLLSASLAPLGHAVAEGLRLPSMGVYLQPLAPTREFAPPVLGGGSFGAPGNRLTGHGVNLAVERVFAATVPAVRARLGLPPIRTGTARRTRERRLWPVHHGFSPLVVPRPRDWRPGLGVCGYWWPYDAETRLPQELRDFIEAGPPPVFVGLGSATVPDAGRLSAQIVAALRRAGLRGVIQRGWGGLTAQGDDMLSIGEVPHSALFPRMAAVVHHAGAGTTAAGLRAGVPAVPVPIQFDEGFWSARLVSLGVAPAAVPLRRLTVEALSTALLRATHEASYSERARTLGARIRAEDGATPVLDAVTALGG

SEQ ID NO: 7830 - protein, 413 aa, Unknown
  Description of Unknown: Symbiobacterium thermophilum IAM 14863 sequence
MKFVILATGTRGDVQPFVALAQGLRAAGHEAVLAAPGSFESFVRSHGVGFFPMGGDYAALLESPEAQAALRGNPVKMMQVVRQTVFPMMGRMLEDAWAAAQGADALVYHPKALAGAHLVERLQVPCFIGAPVPVVVPTAAFPAPAFVSRDLGGFLNRLTYAAVRSGSRPFRGMINEWRRQVLGLGPRREGEYVQGGRLIPVLHAFSPHVVPRPADWPPEAIVMGYWFPRRDEPWEPPAALAAFLEEGPPPVYIGFGSVSGIDGDGSTRMAAEALARAGVRGVIATETGDAPVRLSDTVLAIPGAPHDWLFPRMAAVVHHGGAGTVAAGLAAGKPTLVCPATTDQPFWGRVVHRLGVGPAPIPRRRLTAERLAAAIGTLTTDEDIQRRAAALGEAIRAEDGVGRAVAEILRCSG

SEQ ID NO: 7831 - protein, 1358 aa, Hortaea thailandica
MQVPDRFKPDEEDEEEDVTGVAEPNAGSVQQSFYGMLGAAGQKQMGRTGFLPDSGSESEGDTETEDSNRRSRQHSASASRVSSARPSVDEQCQSPQPESSRHRKNKPSETTLMRQAFKPIREKGDVSDLDLMSQSQFLPSRENQVAAPERPRSATGVMNDAPILDRRLKAKARAEQESSAASSSRRSSESTRSASSSQKKQSVNLPMALAEIFQFDEPEEIIAEYPCWYLQSVLLQGYMYVTKKHVCFYAYMPKKGSASVRSGHLGKQGKRNPRYRRYWCQLKGDVLQYFNDAANPYFPRGTIDLRYGISAELVPEKGQEKGKESGTFTVTTETRTHYFRADSIASAKEWIKQLQKIIFRSNNDGDSVKISLPLANVVDVEANPVIDFAETIKLRVVDNGETYAVDDYFFTFFNHGRDALRMLNLLTEGNEARKLVFGVNNALASDERPTHDEIDRPSLGRARASFDTARQGKGRTTSASFQQPHKISQPPISPSAGDSRESLYSTAEQEAPSPTSPDVTGEVDMSASQILTDDGAFRAPTLRMPQPRQMVSGKTAEGLPGESKDTSRAHDPAQERMSTQPQRRTSDEVPINTEMQSIAVRPPNTSRPSMRVLAAPWQHAASLYGHVRSQSKRGVSYLSSSPKDFYSRISGAVAGGKRYYSEADRPPPDDSIPDPENEMDVAEHEKRFQQHFALPESEKLVAVFYCSLHRVLPLYGKIYISTRNFCFRSLLYGTRTRIVIPLKNIDNLEKEKGFRWGYPGMVVVIRGHEELFFDFASNGLRDDCVVTVFRAVEKAHAVAESVILTEDERQDAEAAAAEHEMLHVARGGGQAAPDLKSPSELDVAGLGGAPILFDDPNASLLDFKPKQPLRITCLTIGSRGDVQPYIALCKGLKAEGHHPRIATHHEFGGWVRKHGIDFVPVEGDPAELMRICVEYGMFTPSFLLEVNSKFRGWLDTLLFSAWQACKGSDLLIESPSAMAGIHIAEALGIPYFRAFTMPWTRTRAYPHAFSVPAKKMGGHYNYYTYTIFDNLFWQITAGQINRWRRKALSLQPTSLEKLQQNKVPFLYNFSPNVVVPPLDFSDWVRVTGYWFLDEGDDWTPPEDLMRFIQKAREDKQKLVYIGFGSVTVGDSKQLTQQVVDAVLKADVRCILSKGWSDRLEVKDPTAIEVPLPTSVFQIRSAPHDWLFRQIDAAVHHGGAGTTGASLRAGVPTIIKPFFGDQYFFATRLEDLGVGIHLKKVTVNTLGRALWIATHDERIRTKARVLGERIRSEDGVGTAIKAIYRDLDYAKTLIKRRPKQIGSGAEIDEPEEESWTFIENDGDNELVTARLGEVVTAETLSQGNWARSGRQSDMGSKAL

SEQ ID NO: 7832 - protein, 1453 aa, Moniliophthora roreri
MANKLPSLQPLTHDPAVAPTIDTSPESLGYLETGVSNSADSSPTASRVKRFSSAVEKLGRSLSGKASPTSPPSGAGHRRLFSINRKGKGKAEDGLSASAPSISRPLSPMGSQPRKSQDDSPFITPPSPTLPASRPSLSAFRGGGSMRAGTQTLIQALQALPWTADPDNDDEVLDHGLPHISDEDGSEDEGQTKKPLASSIHTIHRPVARSMRMSASGRSRVRLNLPNLSPSSDDESPPDIPQSDEDVEDIPDFEERTPRPPDADRVPGLPQKSPQIPGTMPDRIYMSRSGSMATVRLQRRTKLAEKLREVFELEGIDEVRAEMPCWLLRSVLLQGYMYLTNSYLCFFAHMPTKEDQILKSGSLNKKAQRTKRWIKHWFVLKNDALSWYQSSSDPYFPHGIVDLRYAISCEPVGERGFRLRTNQRSVYLSADSVPSREEWVKAIRKVIFKAQNMGDSVKIAIPYSAILDVDKSDAMDFSETIEVKVYDKEASDHFSVDSYFFAYFHDISGALEQIRDAVRAQRTFPGGERAHTVLDTTASRPQAAASEKPSMPSSSSSLFRITSLLRPFSEPRSSNTVTTSSSAAGGAEDFTHISRRPDSSSFVPVTTSGAHTPPKGDPQKHTQQSSSDLLTPTPSNVGVDHTTTSAYTLSSLPSSSSSWTVGVPAWLKASKPRVLSFGSNTSEAVQVAPPGGKVREMYSSTSGSTGTSSRWSGVGDLAYSVLENPGNPVDDDAVERFRAAFAYDEKETLLGYFPGYIFRLLPVYGRLYISTNYFCFKSTGPLAARTRMTLPIRDILSVELSKATRFGHHGLIIIVKGHEELFFEFGAEDKRDAFVALLERQMEDVRRRIASGEAPLPTQGQRDALILEEFEPKPASQSEITEPPMPESMSDSLPAVMFTSASSTFLTFKPQKSLHFTFLTIGSRGDVQPYIALAKGLMADGHRVRIATHGEFKEWIESYGIEFGYVGGDPAELMRICVENGTFTVAFLKEGLLKFRGWLDDLLKTSWEACQGTDVLVESPSAMGGYHIAEALAIPYFRAFTMTWTRTRAYPHAFAVPERKMGGSYNYMSYVMFDQVFWRAISGQINRWRRNVLHISSTSLDRMEPHKIPFLYNFSPHVVPPPLDWPEWIRVTGYWFLDSADVSAKKWTPPEDLVKFLDTARSENKKVVYIGFGSIVVSDPKTMTRCVIDAIVQSGVYAILSKGWSDRLHVKASEASEPEEPLPKQIYSISSIPHDWLFQRIDAACHHGGAGTTGASLRAGIPTIIKPFFGDQFFWADRVEALGVGSGVRKLSVESLAEALITATTDVKQIDRARLLGEQIRAENGVATAIESIYRDLEYARSLIKHNVSESEDDDSIDNEHGTVRDHDFSNSELRSGDSSSGSARGAPSEDWSVISDQDERRSSVSSRHSEGRRPSADRGKRTSLAAAMLSVLPDSLNPGSPRRRTVSTGSKA

SEQ ID NO: 7833 - protein, 1242 aa, Zygosaccharomyces mellis
MDIKGKVPFLRKIEGSFKKNDSSKTKGKSSQGDRGSPSASLDQTPSNKTAMFSTKDEPKSELSVMESNRQMGEDQDDSEDSEGPDTAEGQYASKNIVGLLTTASVMAGMGDQQQANDVADDLDGGEIGSEEFVDAKSEVSTELERVDVSKIDDANEPARSEGSATLRSPGFDLSVEPVGKNRDYLSSLDDDTKRTMVEKLVDHFKLHEDEKFVGDFPGFLLKDILIQGQIYLTSMHVLFFAYLPSNSDEVQLSGNLNVHSRIRGSTRYWAVLRNQSLSLYSSPTEIYFPELEIDLKNTASIAVIQNRGTGKSTNSFKIETKKRSFTFSADSEFAARSWTNSLKKQHFAALNAEHNSVSLKIPLVNATEVIDERVAEYASTVRVKALESSASGINVEFVFVFLDNSSTFFKRRVDAQLELLQQRDVPSLAHVPSKEDSAVSDSTTSLRPVVNHNDLDASAAEKSPKRSLRHHHLLPHLARHQEPSSSSEKLGALSSLRPKFVSKHQSAGDPDASDSYIHSLSPVRGAKDTLGTFVQELNTKAHIMTDGSLWSSSADNETSSGTEFKKGHQRKYFRHGLWNNKPIHYRNNVISFGEEDSYLASPDENREANERFREHFHLNSDDNLIGAYFSHLNRSIPVYGKVYLSEEIMGFRSLLPGTHTKMNLPLVDVEACYKEQGFNFGYEGLILVVRGNAELCFEFSSTEARDDAQRIILEMVKVLKSKRREIMNPTTNILELDPHFAKMKLVEDKINARGIDAPLLVDKNPYYETTIKPHGKRLKIGLLTIGSRGDVQPYIAFGKGLQREGHDVVIITHGEFREFVETHGIAFDEIAGNPAALMSLMVEHESLNVGLLKAAAANFKSWISELLKTAWEACVRLKIDVLVESPSAMAGIHIAEALQIPYMRAFTMPWTRTRAYPHAFIVPDQPMGGNYNYMTHVLWENVFWKGISGQVNKWRIETLKLPKTNLELMQQNKVPFLYNVSPTIFPPAIDFCEWVKVTGYWFLDEKQSYTPPPELKAFIDQARRLNKKLVYIGFGSIVVSDAKEMTKAITDAVLEADVYCILNKGWSNRLGSRSDEKETEVALPESIYNAGSVPHDWLFPQVDAAVHHGGSGTTGASLKAGCPTIVKPFFGDQYFYATRVKDIGAGIALKKLTSKSLARALVDATHNDKMKMKAQDIKEKIGMENGVKTAINCLYTELEYARSLVVTKAEQRNNSKSRHLEIPSFSAPKLPELNLEKTFAFL

SEQ ID NO: 7834 - protein, 1505 aa, Phytophthora nicotianae
MEAAQEEDKTVAMETPPQTAELEMPQASAEQEHKPKRWKEAFARAVQSIADERRRQSIDVGKFTSFADVVHAAAAFDRDGHIHMDFDEDDDKYDISELQEQDKCREDKSLRTTRQSSRTDYNAPIMTICIMIVGTHGDVQPFVAIAKRLIQDGHRVRLATHAVYRDLVMSHGVEFYPLAGDPKELSAYMVKTGGHLIPLNLEAIQKDVPRNMQMIEEILYSTWPAVSEADPDGDGPGIPGKPFQAQAIISNPVTYGHIHVAERLGVPLHIMFPQPWVPTTAFPHPLANMPYTGKPKKVNYMSYKMVDLLMWQGTEGMVNAFRRDKLQLRRIRKGDGGRDILLDLSIPHAFMWSPHLVPKPHDWGKIYDVIGTVTLGGPSSSYTPSPELEAFLGDDAGPVFVGFGSMVIEDPKGVTKMIIEAAEQAGVRVLIQSSWSDMAGDLTIPDNIFFLGNCPHDWLMPRVSAVVHHGGAGTTAAGLLAGKPTFIVPFFGDQPFWGRAVFDAGVGVEPCPISQLTTQKLRVAFEALESPELRIRAAELRDLMRHEDGAGEAVRSFYRNLPLHHMRCDLDCGQAATMWSQKDKIRLCDECAFVVASRPENSAKDIVEYTFVDYSARGPENVLEGAASGVGAFAHVFGSGFKDVVVKPAQGYREEGAKGAVIGLVKGLGGLMISPLVGTVVFADHLATGAYNNVRGGEDKKKGSLIGDNKKLLNAMGFKTRNVHTGSMSADEVIDGDNLLSSQVAVQLTPEEKSTLEDRFNALIKERKLHGQRALKLANSSLSTSASVDSADEGATVVVNVDGATFNGSDSFDIVFGDGGKVGEALHENEVQELEAEARKEEEAHKKRLESLNSTPLPKMNICMMTTGSWEESVQQYVAIGLRLKADGHCIRIATNSGHRDRIVSAGLDFYPLGGSAITTGNFLKYLHQRSQDQPRHKSRLLNLAHSKLNHRRESFPEVDDLRELVFSLWPACVEVDPLVPGKAFRADAIIAHPYLFGQTIVAERLGVPLHCMSYNPQSRTQAFPHLVSSNMKLHRPYRYAPTNAASYDVIDNVLWNGMRDVLDDFRHSLGLTGRSIANNLLAEWRIPHTYLWNPAILPKPHDWGSEITIAGYVELKESDDDNTDLAAIEQELQSFTSSSAGTPLIYFGFQCSDWDPRRVQDLLGSLEKAARKANVRVVFQGYENSNDDAALFVGGTDVVFEIDQHFPVQRVLPHVDAAIHWGDLSITSTCLAAAKPACVVPRNITQRMWGQALVLSGAGIEPLELDALTPSNLIHVFHMLLDPKLTHCAKRLAPKFSSSTAIETAVSAFYSNLPLAGMRCDLDPARIARVYDSLHEMKLSYEARLVVHQITKDAGSAGDLKYKPLKYSQHHPPRFSLRELELLHPASSNNLKKQPRTKILYTYDPASEELAARVDHERASVTSPSSSKEAKKYGGAPRKKLLQFSRAQSMALNVVELPKFWNSPEEQAERTLEINDKYEKLLVTRKFANGTSSSSASSASSVAI

SEQ ID NO: 7835 - protein, 1161 aa, Aspergillus tanneri
MVEAQALLVPEAAAERSQSSIERSDKDPQQPGSSALSLRLMEMFGYECPEKVIVEYACSLLQSMLLQGYMYVTEGHICFYAYLPRKSTVAIKSGWLHKRGRKNPKYGRYWFSLKGDVLSYYADPSNFYFPSGHVDLRYGISASLAEQKDKSKETKDFQVTTDQRTYYFRADSHASAKEWVKALQKVIFRTHNDGESVKVSFPIGNIIDIEESPMVDFAETFKLRVVDRDTYAIDEYYFSVFNTGQDAYNFLKGLINETTTKNSQTLSSKQDHTANHGRSRGYQNRWSLSNVLSQPRGIGNVGSQQRSVSTSHISFGHDVVGTSPPTKNPEPSDSFVNSFEQATESSAVLQSMTDTTESASQILNRSDVFQSPTIHTLRHRPSDTDRTGRRHSDETARSISNAVADSSTFPRRHGHGIQYAISESDQETQGASKVHTSAPSLNELVRAGVYPLQRAAGLAEYLKNRSKQMSTLLASESMGYLEKVSGMWAGGRKHYGEGEGVQPDDQDVDPEDREDGCGHGDRFRAHFTLPSTERLQATYFAYLHRVLPLYGKIYISQKKLCFRSLIPGTRTKMILPLKDIENVEKEKGFRFGYHGLVVVIRGHEELFFEFNTSDARDDCAVTLHQGLESVRFLAESGMLAEQEKDESEAAKAEHLMLQEARKDATGQYDTRTILDESSELHPIFDDTRASIINFKPSEPLRITCLTIGSRGDVQPYIALCKGLLAEGHKPKIATHAEFEPWIRKHGIDFAPVDGDPAELMRICVENESPSAMAGIHIAEALRIPYFRAFTMPWSRTRAYPHAFAVPEHKLGGSYNHITYIMFDTVFWKAIAGQVNRWRKNELGLKATNLDKMQPNKVPFLYNYSPSVVAPPLDYPDWIRVTGYWFLSEGTDWSPPAELTDFIQRARKDGKKIVYIGFGSIVVSDPSALTRTVIESVQKADVRCILSKGWSDRLGDPASAKPEIPLPPEIMQIQAAPHDWLFAQIDAAAHHGGAGTTGASLRAGVPTIVKPFFGDQFFFGNRVQDLGVGICMKKLNVSVFSRALWEATHSERMIMRARELGVKIRSENGVETAIQAVYRDLEYAKTLARQRSIVSSTPFSPTPSAKTIAEQEEDDGMTDSEEWTFVGDDTDIDISRRVRDRAISDADMLPEPVSGYASTKIA

SEQ ID NO: 7836 - protein, 417 aa, Alteromonas mediterranea
MNILILTYGTRGDVQPYIALGQGLKRAGHCITLATSSRFRKIIEHAGLHYAFMNDGMLTLLDAPEDQGALEDTNNIFQVVKRTLGLLKKIGPIQRALVDESWVAAQQSKPDIIVFHPKAFTAPDISEKLGVPVLMALVVPGLVPTAEYPNMMLPRLRLGGWYNKFSYSFVNRLIGLSVAKYARAWRKAHHLPKAKRFSLLHTADGTPIPVIHGFSSLVVPRPDDWPQTASICGYWHTEDDDHYEPSPELSAFLNTGPPPVYVGFGSMTGRDPERLTDIVIEALQRAGVRGILATGWGGMEIKALPESIIAVDQVPHSWLFPRVCGLVHHGGAGTTAAALQAGKASIVIPFFGDQPFWGNRLHSLNAGAAPIPLKKLTVERLAAGIKEITTNQTIIEHAAALGASLREKHGVEKAVAM

SEQ ID NO: 7837 - protein, 1143 aa, Dacryopinax primogenitus
MEETEDFDPVPAPAPSTATRPLNIRTQSLATVKLQRRGKLAAKLRDVFGLSDIEEVLAEMPCWLLRSILLQGYMYLTNAHLCFFAHLPTDEDQVLKSGTLSKRGGRTKRWNKYWFILKNDVLSWYQSSADPYFPHGNLDLKYAISCEPIGERGLRMRTNQRSVNLMADSIPSRDEWVKAVRKVMFRAQNTGESVKIAIPFNLIVDADKNSSMDFTETVEVKVYDRDEKDENYSLDSYFFAYFHDLDRALEQIQTIIQQHRRAVTDPAAKLGMLHDTTSAGVVSSIGAPDRPIQSDPRSTTFRLTSLLRPFTSYSQVLGLPARTESAPDHINDFGVSRISSQELVASPAPLQDDSRTLKPGLFRPLTTSSEAGPHTSSFPEVGLPHIYPPSWNSSPGQHYQTLQAQQDPSSTGWSVPQWLRGSSRLFSATQSGGDSSSLPHSVILSDHASDDEDREGSNNMGFSLLDGTDVPYVFDPVVAEKFRTTFALDEKEGLIGYIPGSLLRVLPIFGRVYISTNHFCFRSTQPLTKTRMIIPIRDIISAEKQRAFTLTYHGLAVIIKGHEELFLEFSSADRRDACIRLLESQMDVVRQKELIGPSAPTQSQKESDILEDLEPSTPALESEIPRLDAGQEVAPAVMFTSTSSTFLTFKPQEPLRFTFLTIGSRGDVQPYIALAKGLQADGHHVRIATHGEFKAWVEGHGIEHAYVGGDPAELMRICVENGMFTFSFMKEGLQKFRGWIDDLLKTSWEACQGSDVLVESPSAMAGIHIAEALGIPYFRAFTMPWSRTRAYPHAFAVPERKMGGSYNYMTYVMFDQVFWRAIAGQVNRWRRNTLNIDSTNIDKLEQHKVPFLYNFSPSIVPPPLDWYEWIRVTGYWFLDDPDNSQAKKWTPPDDLVQFINSARAEGRKLVYIGFGSIVVSDPDAMTQCVIQAIEQSGVRAILSKGWSDRLSSKKDPKALEKEHAKLPSTIYPIASIPHDWLFARIDAACHHGGAGTTGASLRAGIPTIIKPFFGDQFFWADRVEALGIGSSVRKLTVDSLTDALRNATTDEKQIARAKLVGQKICAEHGVANAIEALYRDMEYARSLVKRHRAEGEEHLRTSGIREGVSSADMRESSLDSSSGSAMGTSEDWEAVSCSSAQGH

SEQ ID NO: 7838 - protein, 1041 aa, Penicillium oxalicum
MPSVVPTTEGATAARHNQIESEDWPTQLSDASSPRSSGERMQFNGDGLNTGVRILGDGRLKIRINQYRPNIAGLLNLARSSKSHKTAENQAETPAGDQASKVDESIRRAEKEADNFPLHLNVVIQVIGSRGDIQPFIALGKELKKHGHRVRLATHLAFREFVLDADLEFFNIGGDPAELMAFMVKNSGLLPNMDTIRSGAILKRRREMKDIVDGCWRSCFEMGDGTHLHQIKDDLWSEEQDYRRRPFVADVIIANPPSLAHIHCAQKLGIPLHIIFTMPWSPTQAFPHPLAVIQQQDCKPSVANFVSYAIVDMMIWEGLGDIVNKYRRTVLSLSSLDAITAPSILHKLQVPCSYLWSPAILPKPEDWGDHIDVCGFSFLPAKPDYDPPKEITKFLESGPTPIYVGFGSIVVDNQKRLTETVYEAVKKSGQRAIISKGWGNVGVDDVEVPDNILVIGSCPHDWLFRQVSCVVHHGGAGTTAAGLALGRPTIIVPFFGDQQFWGDIVARNGAGPLPIPHKELTVDGLSNAIEFALKDSTREKAQEIAKKMEGESGVRDGVRSFHRQLDLRSLRCAVCPTRPAVWHLKHTEVGLSALAAAILVETGKVDPQDLVLNRPKEYDTYRDPVGPISASAQVLFGAIAHFVGGIADAPAYVVSDLAVARHALESSHGRTDLNREWRRHRSRSRARSARIDNKARMSNETRSSEETRASGETDPSKGSHPSNETRTSDRTWEDDQVQANDGVQSNVDTQTGGERARSGEENHPSHTVGDTAQQRSPKRNEDAHNSDGVESLSDESGSCDATRAEPNLELERECSIKLQRTATMASVNTTSKSHNILYEIASLGGKMSLKFVNLLIWLPTDLTLSLSKGFHNAPKLWHDPMVRSTPKVHDIQSGFKAAGKELFHGFYDGVTGLVVQPQHGYKENGAKGMMKGVGKGIGGVFCKPPAGLWGLAGYPLMGIRRKLLDSLGRSSEGQIVLSRIAQGHEEMYASTPAERAEVIKKWSVIEKSLTPGLSSYLLKTKRWFITSSRDAHRIADTAIQA

SEQ ID NO: 7839 - protein, 1393 aa, Aspergillus calidoustus
MRPFLDDAKRRVDQRLSASRQSLSTSRMFSSAFPERLKDDQDDAQIDYTAPPGGNRSRDGLQYMGQSMLSLIAAVGTRSDFRARFDDSSDSEGEGETDTRQVAHSQEADSPRLDGTLQVPPSPGDRSSSQDRGRRHRRSISDHKLFQPLKTGLKRDKGRETTAPPPQPSTNERLSPFPALPSLPRPRSATPRAAPVLSRMLEARARLESEEMESSETLETSQEGKNDSIAPQSKASPLSLRLMEMFGFSTPEKIIVEYACSLLQCMLLQGYMYVTEKHICFYAYLPRKSTVVSKTGWIHKRGKKNPKYNRYWFELKGDVLSYFAEPHNRYFPTGRIDLRYGISASLTESKEKGRESRDFQITTDYRTYYFKADSSRSAKEWVKALQKVIFRTHNEHDSVKVSFPVENIIDIEESPMVDFAETFKIRAVDAEDGVAIDEYYFTFFKSGRDAFDILKGLIGETPTRGSPSGLSPQPNCATDSRRARGSQSRWSITSANKLQEPLSTSSRRRRSASASLLGSEPHGAATSPRIRQQDSAGSFIQSIDQTTESSAVLQSVTDTTESASDILNRSDVFQSPTIHNLQKQSAGPIRSRRRNTDETARSIAEHGLDGLVRGGPETQDAISDSGQESKDVSRLTSALALNDLVRAGSFPLRGAVNIAEYVKSRSKEMSTLLATESMGYIEKVSGMWAGGGKHYDEVDGRPNERGLDLQTKEKDAERFRAHFALPPTEKLQAAYYVHLHRMFPLFGKIYLSQNRLCFRTLLPGTRTKMILPLKDLENVEKEKGFRFGYHGLVLIIRGHEELFFEFSDPGSRDDCAVTIHQRLETVKFLAESALLTQQENDDSEAAKQEHRMLQEARLDASSEQELRSALDESSEIQTIFDDPRASIVNFKPTESLRITCLTIGSRGDVQPYIALCKGFLAEGHKPKIATHAEFEPWIRKHGIDFAPVDGDPAELMRLCVENGMFTYSFLKEATAKFRGWIDDLLSSAWKACQGSDILIESPSAMAGIHVAEALRIPYFRGFTMPWSRTRAYPHAFAVPEHRMGGAYNYISYMMFDTVFWQAISKQVNRWRAKDLGLKSTNMDKMAPNKVPFLYNYSPSVVPPPLDYPDWIDITGYWFLNEGSNWTPPKELADFMKRAREDGKKIVYIGFGSIVVSDPAALTRTVIESVLKADVRCILSKGWSARLGDPSSAKAEIPLPPEIHQIQSAPHDWLFSHIDAAAHHGGAGTTGASLRAGVPTIVKPFFGDQFFFGNRVEDLGVGICMRKLNVSVFSRALWEVTHSERMIVKARNLGERIRNEDGVGVAIQTIYRNLEYARTLTQQRLIASSTPLSPTQAAKPDTEDDFADIEDWTLVDDEAEFDAAKRARDRTVSDANNSPEPFFLGSTHFVDSPK

SEQ ID NO: 7840 - protein, 1491 aa, Monosporascus sp.
MELPERLKDHGEDAEEDAIAPSQGPQMFMNMNQSIFGLIAAASSTVDFNDRFEGQSSDEEDDAGDDDAIQRQTKGKGREDVAQTTVLGKAASGKEQTGRHRRRISGQLLRSLPQLPRLATRSLSKRSSKLKASRGSDESIGHEGDAEAPESPQMTEPRFPKIEVTKADREGRRAPVMSRILEARAEMSSRPSFDLERLSGDRRREGGDVDEAGPSALSRKLKEIFEFEESEDVVEEYPCWLLQSVLLQGYMYITSKHICFYAYLPKKAHEVAKSGYLSKSGKRNPKYNRYWFRLKGDVLAYYRDASNLYFPNGQIDLRYAISANITDKDKDGLHFTVVTHHRTYYFRADSAPSANEWVKSLQRVIFRSHNDGDSVKISLPIENVLDVEDSQMVEFADTCKIRVIDNDETYAIDEYFFSFFSFGKEAINVLKILTDDASKQQTREAIAVFATPGDGQPASPRQGSTSMGREGSPSPGSGARSPRLRENVRATLSPKLPESRSPRASADLSRSGFDPLGIFARKSMDRETVSPNTHHRRSFSAGRSLSGHGRPSEQRTASEKHESSESFVQSSEDPSGMSALMESSNEDPSGSQILRGSEVFHNPTIRRTISDASATQKKRSSSRHRLSHKPDDVFLTSHVKHAAGEGQLGTGVTGGGHGQVPPDTPTLQNLVKMGAYPLQRAGLFANYLNQTSRRMSNLLATESMGYVEKVSGMWKGGRKHYHEQPGLKTDDELDDGDEDTQVATATDRFRAHFALPETEKLRATYFGFLSRVLPLYGKIYISDRHFCFRSLLPGTRTKLILPLKDIENVDKEKGFRFGYSGLVLVIRGHEELFFEFSQADVRDDCAVTLLQGIEAARYLRESMILGKGEQELADEAMAERDALQEARLQLNPEHDLKLPQTASTLSDSSPTILFDDPKASFLNFKPAQPMKVTCLTIGSRGDVQPYIALCKGLMAEGHKPRIATHLEFKSWIEGHGIEFAPVEGDPAELMRICIQNGTFTWAFLREANSKFRGWLDELLVSAWTACQGSDLLIESPSAMAGIHIAEALGIPYFRAFTMPWTRTRAYPHAFVMPEHKMGGAYNYFTYLMFDNLFWKATAGQVNRWRATSLGLPPTSLEKLQPNKVPFLYNFSPSVVAPPLDYSDWIRVTGYWFLDEGNASGWAPPDDLQRFIEQARADGKKLVYVGFGSIIVPDPAKLTQEVVDAVLRADVRCVLSKGWSDRLDKGDGSGAAAAVPEVPLPPAIFQIKSAPHDWLFGQVDAAAHHGGSGTTGASLRAGIPTIVRPFFGDQFFFGARLEDLGVGICLRKWGTGAFARALWEATNSERMIVRARVLGESIRKENGVDTAIQSIYRDLEYAKSLIKSKTGKNAAAAQANANAAGASGQGSTDGVASGNTDDDDEEESWTFVGGGSGDDALEQELAAKKGGVLSGSEADSIGSFPGGGASTTPTAGNGNAGATSGRMALGSKLLGGGRGSSISSNNSNKPTVAASS

SEQ ID NO: 7841 - protein, 740 aa, Aspergillus niger
MANGAAASIPLALLSAPADRRRHGHPTDGRDSEAHVTDDGRVGIAVDEDDPQVASLLQALQRRPIPHPSEIEKEAYFPLRLNVVIHVVGSRGDVQPFVALGRALQKQGHRVRLATHFVFRDFVKDNGLEFFNIGGDPAELMSYMVKNPKLIPKMETLVKGTVGRRRGEIRKMIGGCWRFLSMKSRQTVIDVPRMPWSPTQAFPHPLANILTHDTRPSVANFVSYILTEMLIWQGVGDLINEFRRFELGLDQLEGTGAPSLLHRLRVPFTYLWSPSLLPKPDDWPDHINVTGFQFLPSNRDYTPPQDLADFLETGAPRHYALTQTILEAVEITGQRAIISKGWGGLGADEINQRDVFFLGNCPHDWLFQRVSCVVHHGGAGTTATGVALGRPTIIVPFFGDQPFWGSLVAQNGAGPPPIPIRNLTADRLASAIHSCLKPDTAEKAQKLGENIRAEDGARSAVDNFHQQLDTQRLQCALCPDRPAVWRIKSTRILLSAFAATVLVVDKKLNPKDVKLYYSKRYNTNYGCLGTEAFAGAMSNFLTGIVEMPLNAVQNIRQPPSDRFAAHYNLPSHEAYQTMQSPGSPRVFGQGEGTLNNDTRVTPGLTAATTIKSQADAPSMATKRGPLQKLAASASYMGRRTLNWMVEVPMGLTVMLSQGFHNLPLMYHDRAVRDTPEVTGVKSGFVAAGKEFAYGIYDGVTGLVTQPSQGWNDGGFGGMTKGIGKGVGGVLLKPQAGEWSR

SEQ ID NO: 7842 - protein, 891 aa, Trichoderma atroviride
MLLSRTRSATAPHVGADQGLKKDVAPVAPEEKGCYGCDGRFKVCFETDTGGLVSWCKDLQKASQRVKNDVCSDPVCERRKSTGGLRPPLNIAILIVGSRGDVQPFIPIAQILSKPPYEHRVRICTHPAFKDFVEAQGVEFFSIGGDPEALMSYMVRNPGLFPNRKSVRAGDIGKRRAEMWEIINGAWRGCTEAGNGMGEPIRATDVENVEDLFLADAIIANPPSIAHIHCAEKLGIPLHMVFTMPFSPTSAFPHPLASMNYAGADAKTANYLSFVVMELLMWQGLGDLINKFRRKLALDPISVMWGYQLLSRLRVPFTYLWPQSLIPKPPDWGSHIDIAGYSFLPLASSYTPPPDLLAFLEDGPAPIYIGFGSIVVEDPDALSELIFGAVKLAGVRAIISRGWSGVGDKCEVPKEIYLIDNCPHDWLFQRVSAVVHHGGAGTTAAGIAAGRPTVIVPFFGDQPFWGKMIARSGAGPEPVAFKALTKEILAESITFALTPEAQEAAKRMAEEISQENGAEDTAKRFQDRIGLDKYECEICPGRLATHWHKKTRTRLSGFAVACLVDRGLIQPPELELIRRKNWYVDEGVEHPLVGFVSALTGPMMDYTTATFDYTHALKSRPKHAPAPPEGRRQSWLDPWAEKTENGSIASNGTSPSRRINPTTFSRREMELYASRVARKSIKTNNADIDTLIRAPTLYDKQKAAWLARERGRNGRIFYLTRATGRYASELTKVTLKVPVAFFYNIANGFHNYPSVGFAGVEVRRRDQINDLESGLAAAGKEFTLGMWEAFSGVVVWPYKSIHEEGAKGIGKGVWRGSKGFFSNLGASTFGLPGYTLKGVERELQKHHLTNCKAEVILIRLRQGIEAFRNATPRERDRVISRWNKHLKKKGF

SEQ ID NO: 7843 - protein, 436 aa, Devosia sp.
MKRIALVTIGTQGDVQPYLALAIALKERGYSVVLGASEEFQDMVEGYGVEFHTLGPSIQAFLLQQRFENAMSQSMLINGPSLLRQGQQIVDTAARHAWNMCQGADMLILNMNTSFGIDIAEALHIPAVMVALQPLNSTSEFPLCIYYGADFGPAFNKLTYTAMTVQQIYYNLPRNKLRRELMGLDSRKKGGFFRNTDGTPLTTLYPYSPEISPRPRDWPKSAIVTGYWQLKDRTDWQPSEAFQKFLSEGEAPVYIGFGSMPFGAERNTKILKEAVAMWGGRAVVARGWGGINPQDLPDTIFAIEKAPHDKLFKYVSAVVHHGGAGTTSAGLHLGRPTFVVPQTVDQPYWGRRIYELGCGPKPVRLRKLTSEILAGALADLTTNEDYRRKAADIAEKLHAENGTDKAITIIERVMANYVPAANKVKKARKPSLKLVG

SEQ ID NO: 7844 - protein, 1454 aa, Metarhizium acridum
MDNFPSLSPEGGGDGGSRQSAGADDSGGQRRISRNPFKKGHDDPSATLPDLPDLLKHSDSDDEDSPNDPASQRGRAMSVNMNQSIFGLIAAAGSRVDFNTRFDDGSSDEEDSEQSKSSNGSQDLSQTIILSPRDKDARRGHKKKLSSGHRLLKSLSTLPKRKSKKREASRLSAPLMGSSDEARESADLATSAMAQDNEDDRLPPVMSRMLQARAEIASRPSFDMERRSSDLAASGDSDESSALAKRLMEIFEFDEPEQVIEEYPCWLLQSVLLQGFLYITSKHICFYAYLPKKANVVAKSGYLSKSGKRNPKYHRYWFRLKGDVLSYYRDSTNLYFPHGQIDLRFGISANIVDKDKDNLQFNVITSHRTYNFKADSAPSAKEWVKSLQRVIFRSHNEGDSVKISLPIDNVIDIEETQMMDFSDTCKIRVVDNDETYAIDEYFFSFFNLGKEAINVLKILVEDASSTKRTPGKLIAEQELQSHEQPEKNSNSQPSLQNSTHPAELNPHQAMHVDKIRTTKLPEAVKATLSPMSPHSANPSPRASVEFSSRTSLDAIRYKGRRSHEVSSMMSEQSTRRSFSGHRKTQSTRQFDERRGRHIMDSSDSNLHSSTDDPSYSNLVVSVATEDPSASQILKGSEVFHSPTMRRSDGSSQSTDAREEELSKNSEIFPDASVSMKHAATTGSINQVGCHGQADQARSTTPTLQSITKMGSYPLQRAGAFADYLNKTSKRMSSLLATESMGYVEKVSGMWKGGRKHYGEPAGLRPDEDELEEDSEGKVQTSMERFRAHFALPESEKLQATYFGCIIRVLPLYGKIYISDRSFCFRSLLPGTRTKLILPLKDIETAHKEKGFRIGYSGLTVVIRGHEELFFEFSQVDVRDDCTVTLIQSLETNRYLREAGLLDLEEHEEEDQAMAERDALKSARQEDFPQHEILPPQQADSQPNVPTILMDETDGSFLTFKPPQPMRITCLTIGSRGDVQPYIALCKGLLAEGHKPRIATHAEFQGWIESHGIEFAKVEGDPGELMRLCIENGTFTISFLREANSAFRGWLDELLDSAYQACLGSELLIESPSAMAGIHIAEKLGIPYFRAFTMPWTRTRAYPHAFIMPEHKMGGAYNYMTYVMFDNIFWKATAQQINRWRNKTLGLPNTSLEKMQPNKVPFLYNFSPSVVAPPLDFSDWIRVTGYWFLDEGGEYEPPKELSDFIQKARDDGKKLVYVGFGSIIVNDPVKMTQEVIDAVLKADVRCILSKGWSDRISPKDDPAKPRPDEPEMPAEIFVIKSAPHDWLFRQIDAAAHHGGSGTTGASLRAGIPTIIRPFFGDQFFFATRVEDLGVGVGLRRWGANSFGRALWQVTRNERMIVKARVLGEQIRKDKGVDTAIQNIYRDLEYAKSLIKGKVGRYGQPDAEEDEDTEESWTFIGSDEPDPEMVTKKLSEGLGGVGKEKTFGSQAIKASS

SEQ ID NO: 7845 - protein, 679 aa, Ustilago maydis
HAYLYRVLPVAGRFFVAEHHLAFRSSGIAAKTVGRTLMLVPLHDVISAAKHVAFRPGHHGMVINISGHEELFIEISSAHRRDELLGLIEYQLELVRGGRESRISHEAATRERSNALVLRDLSERIHDGPATASMASSANSSVLSQTGPGFDNQSTSLSQLEEGSSVLSFAPTAPLTFTMLTIGSRGDVQPYIALAKGLLADGHRVRIATHAEFGPWILGHGIEFSEIGGDPAELMRICVENGTFTVSFLREGVTRFRDWLDDLLASAWRACQGSDVIIECPSAIAGIHVAEALQIPYFRAFTMPWTRTRAYPHAFAVPSKKAGGNYNYMSYVIFDQMFWRASAFQINRWRKKLLGLKPTSFDKLEQHKVPFIYNFSPSLVPRPLDWFEWIHVTGFWFLDNPDNSSSKKWEPPVDLVEFIRVARENKRKLVYIGWGSIVVPDAAAMTRCVLQAVKKSGVCAILSKGWSDRLSSDPSTPIDASISADVFQVSSVPHDWLFPQIDAACHHGGAGTLGASLRAGLPTVVKPYFGDQFFWGQQIESLGVGSCVRQLTVDSLAKALVRATSDKKQIDRARRLGEQIRTEDGVGDAVKAIYRDLEYATSLIKRDTRIEHMPMVTRTRTTDTALARRGKDTSVAVQDENDEDGHTSDEWSDIGGGSESSPRDETEVPRSSLILNRLP

SEQ ID NO: 7846 - protein, 1677 aa, Stereum hirsutum
MSRLSRSQMSIPTLASLAASASAPSTSSTPDDPAATQDRSNVVRRVMEKTADKLSRSKSLERRGQQGPSSKQPTSPRRVFSITRKGKEKQQPGDDARPSSLSKCSTPSTPSEPDESPFIRPPSPTQPPRRPSLQPFTGDGSMRAGTQTLIQALQAIPWEEDQDNEDDPLPNNLDPVDSDSDEDERPGQAMASSIHAIHRPVVMSRRQGSQLGLYSPITAASTKFNPSLPNVSTSPDTIGRSPSDEEEEEELEEDFEAAPTPGPGHASPQGMHPMEDARAPMSALLEDEIGATAARMASERTNSLATVATVKTVKVNRRARLAAKLADVFELSGINEVIAEMPCWLLRSVLLQGFMYLTNSYVCFFAHMPSREDQVLKSGSLYKKAQRTKRWIKHWFILKNDVLSWYQSSADPYFPHGVVDLRYAIVCEPVGEKGIRLRTNAKTIHLTADSVPSREEWVKSIRKVIFKAQNMGDSVKIAIPYSTIIDVDKSSAMDFSETIEIKVVEGLSASEELSVDSYFFAYFHDLPAALEQIRDAIAMYSLRTRRSELAGGEGEEGGGGEMLIDTTSPRSPPQSNRNSRLVEEAGQGQSGQGQTGGAVASKTSSPFRLASFLRPFQEPTTTTTTTTQVQVPPQTPRSTISAPATAVTPDLDTSEEFTHVRKRSSQSFIPITSSPPPSSAGGEFPWSTPPLSGSPGSAAMLPQSASETGLQQSVGSLTPTPSTIGVGGGLGLTSTTGSPTPPHLHPHGHTYPPATTADALSMPPVGGSFMSTSSSGISSNNGGAAGTAGTRPSAFAWGVGVPSWLKIPSRKSLVGPFGVGGGSGGVGGSGGEQGKGDMEGKGVSEVYTSTGSAVGDTGGGDTGSGSGQLAGSVGGGGGGGDMTFSILETPDWEVEAEMAGKFRNDFAFDERERLLGYFPGYIFRLLPVYGRLYISSNYLCFKATGPLATKTRLMLPIRDILATEVSKAFRFGHYGLVLIIKGHEELFFEFGLQDRRAAFVHLLNRQMEDVRARILSSAATSNAETPTTATGTGALSSSPLNNSFNGTVNASPRSKPDALFLEEFAPLRDSEEATAAGSGSGADPRPSMTDSLPAVMFTSTSSTFLTFKPKESLRFTFLTIGSRGDVQPYISLAKGLMRDGHRVKIATHGEFQGWVESYGIEFGYVGGDPAELMRICVENGTFTVSFLREGVAKFRGWIDDLLKTAWDACQDSDVLIESPSAMAGYHIAEALRIPYFRAFTMTWSRTRAYPHAFAVPERKMGGSYNYMTYVMFDQVFWRGTASQINRWRRNILGLPSTSLDKMEPHKIPFLYNFSPTVVPPPLDWPEWIRVTGYWFLEDASASASKWTPPPDLVEFIDNAHALGKKVVYIGFGSIVVSDPKAMTRTVIEAIVQSGVHAILSKGWSDRLTKNVAEVAEPEEPLPKQIYPLASVPHDWLFKRIDAACHHGGAGTTGASLRAGIPTIIKPFFGDQFFWADRVEALGVGSGVRKLTVESLAEALGTATTDERQITRAKVIGEAIRSENGVATAIEAIYRDLEYARSLVKGAVSPDDVIVEGTSPSSGSPGGSGGGDTEDESPDHDKLLSSPPSGSIGGAPSEDWSVISDLEEPSRLSLSSTSRQSEGRERRISFKRSGITATMLSVLPGALTTPAVQLTHRRSRSDGSCSASTNGRPSSSHS

SEQ ID NO: 7847 - protein, 1417 aa, Rosellinia necatrix
MASHPDEDATRRRLSRKTLKKQTGGRRPTLDFPDRFKELRDDADEDVLPPSQGPSMFMNPNQSIFGIIAAARSTVDFNDRFDGQSSDEDDNDDDENDGDVTGKAKGRRKKYEHVAKTTILKKSSSGKEEGSIDKKHRRRISEQLLQSLPHLPRLATHSLSQRSKLTPPRSFDTKLSVDNKMPASPVAEPQSPLLEADTADREERPAPIMSRMLEARAEMSSRPSFDLDGLSRDQQNQKGETGPSALAQKLKEIFEFDQPEDVIEEYPCWLLQSVLLQGYLYITAKHICFYAYLPKKVHEVAKSGYLAKSGKRNPQYNRFWFRLKGDVLAYYRDASNLYFPHGQIDLRYAISASVTDKDQDAVNFSVVTHHRTYHFRADSAPSAKEWVKSLLRVIFRSHNEGDSVKISLPIENILDVEDSQMIEFADTCKLRVIDNDETYSIDEYFFSFFSFGKEAISVLKLLVEESSRRHSGDNEHNAVRGSAVVAPTLHENVKATLSPPSRTHQEPSSRSSSDIIRDAFHTSGRRSLDLEHDRSQRSFSRCRTPSKGHQRGSSASREIRGSPDSCVQSLEDPSLSGLLASSNEDPSGSQILKGSEVFHRPIIRHGDSLSRVSDAIGPSDKPRAHERQPEASQQLPHPMTTGHVNDSITGEGPDRVTTPTLQNLTKIGTYPLQRASVLASYLNHTSRKMGGILATESMGYMEKVSGMWKGGRKHYHGTPGLRIDEAEDDEDDGTDGKHTTAMERFRAHFALPETEMLRATYFGFLLRVLPLYGKVYISDRHFCFRSLLPGTRTKLILPLKDIETTDKEIGFRFGYSGLVVVIRGHEELFFEFNQADVRDDCAVTLLRSLESTRYLGDAELLEDSPGEKDDALAERDALNEARLLEGTEHELKMPQEASGLSDSSPTILFDDPKASFLNFKPSESLKITCLTIGSRGDVQPYIALCKGLLAEGHKPRIATHAEFREWVESHGIEFAPVAGDPGELLRICIENGTFTWAFLREANSNFRGWLDGLLASAYSACQGSDLLIESPSAMAGIHIAEALNIPYFRAFTMPWTRTRAYPHAFVVPEYKLGGAYNYVTYVMFDHVFWKATAHQVNRWRNNVLGLPNTSLEKMQPNKVPFLYNFSPAVVAPPLDYSDWIRVTGYWFLDEGQEWTPPKDLREFISKARKDGKRLVYVGFGSIMVPDPAKMTQEVIDAVLKADVRCILSKGWSDRLDKAQASVPEHALPPEIFQIKSAPHDWLFRQIDAAAHHGGSGTTGASLRAGIPTIIRPFFGDQFFFGSRVEDLGVGICLKKWGANSFAKALWEATNSDRMIVKARILGETIRKENGVSMAIQCIYRDLEYAKSLVASKAGKNAAAGNADETIGDDESEEEESWTFVGGDEIDPELMVKNVLAEMESNNNASRLFGASSSTGSS

SEQ ID NO: 7848 - protein, 402 aa, Glycomyces sp.
MRVLLSTYGSRGDVEPLVGLAARLRELGAEVRVSAPPDAEFTKLIEGAGAVHVPVGRNAQDMVKGVTIGAAKDARQLAAEVVAMRLDMLDAASDCDALLATGLLPAGAREVAERVGIPYVFAAFAPRTLPSPHHRPHRRPGRPFPPGETDNRVLWDIDAANVQDMYGEPLNAHRASVGLAPVANVRDHVYTDRPWLAADPVLGPWPETPELDVVRTGAWFLPDERPLPADLEAFLDAGEPPVYVGFGSMPRHVLEDTAEVTIAAVRGLGRRALVSRGWAELAVVEAAGDCFAVGEANHGALFPRVAAVVHHGGAGTTAKAARAGAPQVVVPQMADQPYWAARVAEVGIGAAHEEPTPTVETLSAALETALDPRTREKAAAFAAQMPVDGAAVAARLLTDLIR

SEQ ID NO: 7849 - protein, 1436 aa, Fusarium oxysporum
MASQADDAPAQASIGAGDIKEHVHEELHRRKRQNSTATVFPEPLRESDAEDEEEDDTTQGPPMFMNMNQSIFGLIATASSRVDFNDRFDGMSSDEEGEGSSSQHSRDHIAQTSILQPGGKGKDKGHRRKRLSEHKLLRSLPALPKLRSRHKSQPSRLSAPVETADESDVEDNGTLSPAPALTLTRQDTQGVMSRMLEAKADLSSRPSFDLDRLSSDVSRSSDGEVVSALAKKLKEIFEFDTYEQVIEEYPCWLLQSVLLQGYMYITSKHICFYAYLPKKANEAVKSGYLSKSGKRNPSYTRFWFRLKGDVLAYYKTATDVYFPHGQIDLRYGISANIVDKDKEGLHFTVETHHRTYKFKADSAPSAKEWVKSLQRVIFRSHNDGDSVKISLPIKNVIDIEDTQMIAFADTCKVRVIDNDETYAIDEYFFSFFSFGKDAINVLKILIEASAESRSAEKAVSSREENESSQSPSGRTSMAASRHLPQIDRLYTGKLPDAVKATLAPMSPLSPHSPSQLSPRASMDAPRSSFDGFRRFGRKSMDVPSSIGDFSPRRSFSGTRRSTSRHQHGSTTPKQQQAQDSGDSFVHSSIDNPSISTLSPSSFEDPSASQILQGSEVFHSPTMRRSASASRKRDQSGKKTPRNSTSNRERPRHIQHAATTGAMQEMGGETSDSQRPVTPTLNSITKIGAYPLQRANAFAEYLSRTSQRMGSMFATESLGYVEKVHGMWKGEHRHYDEPQELKTDDDADDIDSDAEDKTQTAMDRFRAHFTLPESEKLVATYFGAIFKVLPLYGKFYISDRSFCFRSLYPGTRTKLILPLKDIENVHKEKGFRFGYYGLTVVIRGHEELFFEFRRPGLRDDCAVTLHQLMETNRFLEKSGFLDQEEQDDEEAAAAIAERDALKAARQDEFVNHELELPRETSGVSNAPTILFDNPNSSGLAFKPQKSMKITCLTIGSRGDVQPYIALCKGLLAEGHKPRIATHAEFQGWIESHGIEFARVEGDPGELMRLCIENGTFTWAFLREANSTFRGWLDELLDSAYTACEGSELLIESPSAMAGIHIAEKLGIPYFRAFTMPWTRTRAYPHAFIMPEHKMGGAYNYMTYVMFDNIFWKATAFQVNRWRRKTLGLPSTNLEKMQPNKVPFLYNFSPSVVAPPLDFSDWIRVTGYWFLNEGGDWEPPQELQDFIAKARADGKKLVYVGFGSIIVKDPAKMTQEVIDAVLKADVRCILSKGWSDRISPKDDPSKPRPEEPEMPPEIHVIKSAPHDWLFSQIDAAAHHGGSGTTGASLRAGIPTIIRPFFGDQFFFATRVEDLGVGVWVKKWGTNSFGRALWEVTRNERMIVKARVLGEQIRSESGVDSAIQCIYRDLEYAKSLIKRNAGKAAQHDANEDDDTEESWTFVGRDEPDPDAVTKKLSEGLVDTEKPLSLGSQAPSTAAA

SEQ ID NO: 7850 - protein, 1440 aa, Fusarium avenaceum
MASQADDAPAQASIGEEDIKEHVHDELQRRQRQNSTATVFPEPLRESDDSADEDDGPTQGPPMFMNMNQSIFGLIATASSRVDFNDRFDGMSSDEEGEGSGSQNNRHEDIAQTSILQPAGKGKGKANRRKKLSDHKLLRSLPALPKLRSRHKSQPSRLAPVEADDESDGEGSGALSPAPALTLTRHDTQGRLAPVMSRMLEAKADLSSRPSFDLDRLSSDVSRSSDGDEVTALSKKLKEIFEFDEYEQVIEEYPCWLLQSVLLQGYMYITSKHICFYAYLPKKTHEAAKSGYLSKSGKRNPSYTRFWFRLKGDVLTYYKNAADVYFPHGQIDLRYGISASIADKDKEGLHFNVETHHRTYKFKADSAPSAKEWVKSLQRVIFRSHNDGDSVKISLPIKNMIDIEDTQMIAFADTCKIRVIDNDETYAIDEYFFSFFSFGKEAINVLKILIEASSGSRSAEKAVSSLEDNDGTESPPGGASLAASRHGSNMSKLRTGKLPETVKATLAPMSPLSPRSPGQMSPRASIDGPRSSFDAFKRFGRKSMDIPSPIGDHSPRRSFSGTRHSTSFHQHGTTTPKAQDSGDSFLQSSMEPSISTLSPSSFEDTSASQILEGSEVFRSPTMRRSASASRKRDQSGKRTPRNSSSQRDRPHPVHHAATTGALQDMGGEQSGSQRPVTPTLNSITKIGAYPLQRANAFAEYLSRTSQRMGSMFATESLGYVEKVHGMWKGEHRHYDEPHELRTDDDGEDMDSDTDDKMQTTMDRFRAHFALPESEKLVATYFGAIFKVLPLYGKFYISDRSFCFRSLYPGTRTKLILPLKDIENVHKEKGFRFGYYGLTVVIRGHEELFFEFRRPGLRDDCAVTLHQLMETNRFLEKSGILDQEEQDDEEAAAAIAEHDALKEARQHELADHELELPHEISGVSNAPTILFDNPNSSGLAFKPQKSMKITCLTIGSRGDVQPYIALCKGLLAEGHKPRIATHGEFQEWIESHGIEFARVEGDPGELMRLCIENGTFTWAFLREANSTFRGWLDDLLDSAFTACEGSELLIESPSAMAGIHIAEKLGIPYFRAFTMPWTRTRAYPHAFIMPEHKMGGAYNYMTYVMFDNIFWKATAYQVNRWRNKTLGLPSTSLEKMQPNKVPFLYNFSPSVVAPPLDFSDWIRVTGYWFLNEGGDWEPPQELQDFIAKARADGKKLVYVGFGSIIVKDPAKMTQEVIDAVLKADVRCILSKGWSDRISPKDDPSKPRPEEPILPPEIHVIKSAPHDWLFSQIDAAAHHGGSGTTGASLRAGIPTIIRPFFGDQFFFATRVEDLGVGVWVRKWGTNSFGRALWEVTRNERMIVKARVLGEQIRSESGVDNAIQCIYRDMEYAKSLIKRKAGKNTQHDLAEDDDTEESWTFVGRDEHDPDAVTKKLSEGLVGLGAGSDRPLPLGSQAPTSQTT

SEQ ID NO: 7851 - protein, 731 aa, Wallemia ichthyophaga
MRTNSRVCETYEEPSNRSAQRSRSRSNSAESDDEFEDVGSDFSVLEHSEGTEDVLRAEEDIQQKFNAFFALSEERILGHFNCALFRMYPVPGKVYITDNYLCFRSLQMLGKTKMILPLSDLQAVQPHKPLRFSFHGLIMIIHRHEELFIEFTTANRRDACEKLLSTQLDRLVKNPALRHTQSSKGLKEAQIIEDLSLSYRRPSQTAPVPDEDGLSASTSVVSFQPTKRLRITCLTIGSRGDVQPYIALCKGLIKEGHECRIATHGEYKEWVEGSGIEHREVGGDPAELMQICVENGTFTLAFLKEGLSKFRNWLDELLRRSWEACQETDVLIESPSAMAGIHIAEALKIPYFRAFTMTWTRTRAYPHAFAVPEHRMGGSYNWMTYTIFDQVFWRAISGQINRWRRSTLGLKGTNLQRLAQHKVPFLYCFSPTLVPKPLDWNEWIHVTGYWFMDSFNTNNEENRKGLESEDHQDMLEFVDEGRRLCKKVVYIGFGSIVVSDPDEMTRIVVEAIENAGVYAILSKGWSDRMHTDKKKEEPQLPKCIFSINTVDHAKLFPLIDAAVHHGGSGTTGASLRAGLPTVIKPFFGDQFFNADRVEAANLGASVRKLTVDTLSKALKDATTDKKQIANAKTVGEKIRKEDGVGTAIKCLYRYMDYAQTVVTARAKEHDDIQDDSNMENHDTDDNDDDWTLTSENISDGEIHDSVGVLSLASNIGKRSLGVGKDLLSKKS

SEQ ID NO: 7852 - protein, 802 aa, Aspergillus nomius
MKPLQRSKSDDLADLVDAPPPYTLIAEAGSSTVQDDGRIDVDLDSATARTALRFIPRLSEDDLIHPPPTYSGPVQCDVKLNVVIHVVGSRGDVQPFIALGSELQKHGHRVRLATHDVFASFVRKSDLEFYPIGGDPAELMAFMVKNPGLIPNMKSLRAGEITRKRMMVREMLEGCWKSCIQNDPSTGAPFVADAIIANPPSFAHVHCAQALGVPLHLMFTMPWSSTSEYPHPLANLKYSGTNARFANAVSYGVVEWMTWQGLGDVINDWRETIDLEPVPLTEGPSLVQTLKVPFTYCWSPALVPKPKDWPSYIDVCGFFFRELPIYSPSSELDAFLRDGPPPVYIGFGSIVIDDPPRLTSILEEAVRAIGVRAIISRGWSKLGGSSSKDILYIGDCPHEWLFQHVSAVVHHGGAGTTACGLRFGKPTAIVPFFGDQPFWGKMIGASGAGPEPIPQKSLTAQSLAEAIQYCLTPQAKEAAKDISNKMQYESGVKAAVESFHRNLPLDRMRCQLIPDQPASWIYKRSTKPILLSKLAAQILLNHLRIESRNLQSHEIRPIIITNRRYDPITSTTSATIGYGTDILRATSDMFVKPYQELKGRSATAPAATNAEDPLSKVDSQTTTANTVDWNATGAAIGAGAAGFGKFMKYVYKGVIVDIPLAATEGLRAVPRLYGEEVEDYAIRDWKSGAIAGGKNFTQGMREGFTDIFTQTQKGAMEEGAVGMAKGFLKGTLSIGTKVPSGWLALSLFTNLADLAQLHLVSWLSSSWNNQEPTLGDEVKDQEANHPSAASGGPIYSAKGCKA

SEQ ID NO: 7853 - protein, 1365 aa, Mortierella verticillata
MSLKEHVVKPPTSGSAFLQFVAAALRSESMVGSQQRSEYSEEEDDMVHVNKDGKDKTPHHRMLLRQESTHGLGIHSEGEEDEEDFSDEEGHRLRHHHSEHHPRHHQLHMSQTTHSKDDGDISKSTSGISFGSIRDKKTVAEKLQAAFGYAEVEEFIGEYSCWLARSVLLPGYMYLTTNHICFYANLPSSQDVVQKEGFFSKKSKTTKQFTRYWFILKNDVLSCYSNQTEVYYPIKTIDLKNALSAEPTAHNDQTFYIFTNNRKYTFKTDSELVRTDWVKAIQKSIFHAKMEGDKVKISIPLANVLDVEMNTMAFAEAIQVKVMESDESFAVDEYYFAYFDKTAQTLATLKAQVKNFHQKHSQDPHRDRRIYDSTSPNVNSPRKTPATTFTSITDVPHHRPSSLSGSRTLFQSPSGSKRDSLKLLNPDHNKPASRSSSPGYKSQPTSDTEENDKDKDKSRYGLSFSIRGTTSWIADHKPDFGGSDDHMNLNEKEQEAFRKEFSLPDTEGLSAVVSGYLLRILPLYGRVYLSDNYICFKSKLYGTRTKVIVPLADVEQVNKHKGTRFYFHGLSLLTKTDDEIFFEFSTTETRNTILNTLLDRITPEAQERRFKQRIQSIAETPSVELDDPMGSRLSDSLQLREEPVHVDHMSWASHPGFKPSRPMHITCLTIGSRGDVQPYIALCKRLMQDGHTCRISTHAEYKDWIEGHGIEFGLVGGDPGELIELCVENGMFTVSFIREGLKRFRGWLDELMETAWTSCQGTDLLIESPSAMAGIHIAEKLDIPYFRAFPFPWTRTRAFPHPFAVPEHNLGRGYNYMTYVMIEQVFWKGISGQINKWRKDTLGLGPTSLEKMEAHRVPSLYSWSPNVVPAPMDWHSWIHVTGYWFLDNPDLKWTPPDDLVAFLKADPKNKPVYIGFGSMVVPDPDGMTRIIIEAVVKSGVRAIISKGWSDRLTTLEGGTTATPKKSEEIVIPPSVFMLKSVPHDWLFPQLAGCVHHGGAGTAAAGLRAGIPTVIKPFFGDQYFWGQRLEEAGVGVWCHDLTVKKLTTALVTITTDEKMIRKAHAIGEKIRSEDGVGDAVNYLYHDMMLAKQRLNKNRKDKSEDTPVKFSVRKDEDEDDWWLVQPSSGTSGATSGGEGSESTAGLNVLSGSETESSSTPSEDAQIAFPELIHSLSHQASGSEPMSSHVQTSATEPGPDRSTRLVTNSDESAEVVAGQLEALNPPSRSPVPFFANAFGHGESVPKDRGSTPSSSKSAKRTSTARKVIDSLTSKATNMTGYFSPQLSAHGSHSNQPSPRASMDGHRTSSIGSEHGDFGEHYPSSSSSSTSTAKPPSSSKSTKSFTTDNSGSNEPSKQVTKLTTTHHLR

SEQ ID NO: 7854 - protein, 1205 aa, Saitoella complicata
MDHLNLGEPVTAPSATAPLSTATFSSSIPPPQQPMQAAYTSTSGFETLRSRMSDLALSENCSPTTSAPPKTDTDTDTDTAFRTRLANIFGWPSVPQSVVEFPCYLLKSVLLQGYLYLTPHHLSFHAYLPRKDDTILKSGTLSRKSSRGLRWKREYVLLKDGVLSGFASSSDLYFPTHLVDVARAVHVSGDGKEIRVTMQGGKEHVFGADSELGAKEWVKAMQKVVFCAHNPGDAVKIVIPLPNILETESVPASTSSEETEGVSGASFGSDGIRVKVVLDDETFLIEEYFFAFFGGWEEAVKMIGESVERSNGGQVNGEDGAGVGERKLRESVRDTTASLGSKAGTPTTLGGDDDSSSSSADDDDDDTEGDAAKTNALPTKKSHTIPLPKFPGMKLLGRTRTGHQGTHTTDPSEPVQHPALQRDVEEAITKGETSSRYGDDLGARREEFVGKHGGGGLGGLLRKGVGKIMGGGGASVSGAVPPMEGRQDGGVGGGGVSDVVEESHKFRSHFALPAAEVLLGTWQCYITRSIPLYGKLYASDRNLCFRSTLPGTKTRMIVPLRDVETVEPEKGFQVLYSGLVVLIRGHEELFLEFASEEGRDEARRVIEDAVDEALRDRTRSRLTVEEMDQANRDKEEHLFLAERHQKAHDARPPPENEGAGNDVPPIIFDDPGTSFVTFKPEGALRVTCLTIGSRGDVQPYVALCKELLKEGHKPRIASHAEYKDWVEGHGIEFMPVEGDPAELMRICVENGMFTYSFLKEASSKFRDWIDGLLKSAWDACQGSDVLIESPSAMAGFHIAEALGIPYFRAFTMPWTRTRTYPHAFVVPDHKMGGSYNYFTYVMFDNLFWKATAGQVNRWRKRTLNLGSTSWDKMDVQKVPFLYNFSPSVVPPPLDWPEWVKVTGYWFLDDPDSNKKKKWEPPEELTAFIEKARSDGKKLVYIGFGSITVSDPKALTKSVVESVVNADVRCILSKGWSERGGSEEKKDKDEVEVPLPDSMHQIESAPHDWLFPRVDVAVHHGGSGTTGASLRAGIPTVIKPFFGDQFFFANRVEDLGVGIGLKKLNVTQFTKALVEATNDEKMIARAKVLGEQIRSENGCQNAIQAIYRELEYAKSLIKTPQRHHAEGSSEESWDMMDDEEDETNYDEALAEEEQRASKHSLNPFKAINKMLQGVTQTHGSADDDEPDFADATSGRTDVEHQKFSDV

SEQ ID NO: 7855 - protein, 1261 aa, Zygosaccharomyces bailii
MPFHSSGGSDKNKKRPSLTDKHQGVSLSPTKSVLSGLGNVKHMGLELAPAFRVDTHKGDTENSDGHDTARGRYALKSIVGLLTAASVVCGMRDQQRASDVAQDLDDGEDEESYVDASSEPEENDERGSNKQEGEEAVDISRVQTGNEEKLSPETLTTGRSLGFDLSVEPLESASGYNSKLDESIKKDMIDRLVQHFDLGKDEFFAGDFPSFLLRDVLVQGQLFLTSMHLLFFAYLPSTSDQVQLSGNLNVHSRIRGSTRYWAVLRDQSLSLYNSPTEIYFPEMVLDLKTTVSIIAIQNKHTGKPTKSFKIETKRRSFTFSADSEFSAKSWCNALKRQHFAAQNADNDSVSLKIPLVNIVEVVNEPIVGNASTLRLKTLESSRGDAVIEFVFVFLNSSSAAVKKKVDTLIRNFERSGLPALSPTSPDQYSVISDSTDYSSAFDSPEKSDLNALSPCKSPGGHHHHLHLLPRFHRHHLQHLHMSSSCTNVEDNSAILSRDLSNSPSKQRARSTSGGSMVSPVKHVVGDVLRAPETFVQELNISIPSISVKSISQPTSSREQSASSLNADSSLADASNKNQAERESKKSHWHHRHLISELWNNKPLHYRNESVPFDDSDHYLVSPEDNERANSRFRKHFHLGEHAKLVSAYFAYLSRNVPLYGKVYLSDDMMGFRSLLPGTHTKMNLPLVDIEDCYKESGFSFGYEGLILVVRGHEELCFEFSSTEARDDAQHIISERMKLLKKENVTIMSPTTNILEIDSNIAKMKLIEDKINAEGIDAPLVLDQNPYYETSIKPEKKFKVGLLTIGSRGDVQPYIALGKGLQKEGHNVIIITHGEFRGFVESHGIEFDEIAGNPAELMSFMVEHESLNVGLLKDASSRFRKWIAELLVTSWKACRKAELDILIESPSAMAGIHIAEALQIPYFRAFTMPWTRTRAYPHAFIVPDQPRGGNYNYMTHVLFENIFWKGISGQVNKWRVETLHLDKTSLELMQQNKVPFFYNVSPTIFPPAIDFCEWIRVTGYWFLDEKQNYTPPEGLQRFINRARKLNKKLVYIGFGSIVVSNAKEMTQAISEAVVDADVFCILNKGWSDRLSDRSNKNEIEVPLPDCIYNAGSVPHDWLFPQMDVAVHHGGSGTTGASLKAGCPTIVKPFFGDQYFYATRVEDIGAGLALKKLNKKTLSRALKEATTSGKMKERAAMIKERISHEDGVKTAINCIYTELEYAKSLVVAKKKNNSKEGKNRLEIAKFSAPRLPELNLEKSFTFL

SEQ ID NO: 7856 - protein, 406 aa, Streptomyces silvensis
MTAGSRGDVAPFTGLGAGLVAAGHEVTLVTHGRFEELTAGSGVRFHALPVDPRAELHSERGRSLHRSRTGPGRLLRVMTMAKDAAAQMAPGLLAAAENSDALVVSGAVAPLGCTIAEGLGLPSVGVNLQPFYPTGVFPPPMTGTRSLGRTGNRLAGHAVLTLIERIFHDTARDLRTQLGLAPRTLAASRRAHEHRRWPVLHGFSPRIVPRPHDWRPGLDVVGYWWPHDTGRLPADLEDFLAAGPPPVYVGLGSATVPDPDRLSAQVVRALRAAGLRGVVQRGWAGLAATGDDVLTIDDVPHSVLFPRMAAVVHHAGAGTTAAGLRAGVPAVPVPIQFDEAFWAERLTALGVAPCAVPLRGLTTARLADALVRATEDPSHRSRAHALASRLATEDAVAPVDAALASC

SEQ ID NO: 7857 - protein, 1251 aa, Trichoderma reesei
MATPENQWNKPRRQPSSRPPPASEAVVTDGFVLPNLDVPADAPPAYGSHHDQLQFSRTGFEAGAILTADGRVNININTKNQRLAELLGPSIASQIAAQPSLPPAYTLPSLAGEPGKEPPPRLNVVIQIVGSRGDVQPFVALGQVLKDTYGHRIRIATHATFKTFVEENGLEFFNIGGDPAELMAFMVKHPGLMPGIDALKSGEIRRRRKGVQEMMLGCWRSCIEAGDGLGPPPEPHRRMEQWDPSAGMPGDPNHEPFVADAIIANPPSFAHIHIAEKLGIPLHMMFTMPWTPTRAFPHPLANIQSSNADDVLTNYLTYTLVEMMTWQGLGDIINRFRENALDLAPLSLIWAPGLLNRLKISYTYCWSPALIPKPNDWGPNIDVAGFYFLNLASSFTPEPDLAAFLEAGPPPVYIGFGSIVVDDPNAMTRLILDAIHLAGVRALVSKGWGGLGIDAVGVPDGVFMLGNVPHDWLFERVSCVVHHGGAGTTAAGIKAGKPTIVVPFFGDQPFWGAMIARAKAGPPPIPQKALTAEKLAEAITFCLQPDTQAQAQALGCKIREEKGTEAGSRSFHNHLNVDSLRCSVAPSRAAAWRLKRTKVRLSPLAAAVLVQRRLIQYSDLKLYRPYEYNTEDQPPDPITAGACSLVTDISDIGMAIVDMPLDILKSPRKAREAMGDAASQASGDDSDAASIPGSLKGRPGTKTPTAASAAETVGDASSVAPLGHSPSLPAEIDRTRSPTAGSGGGSRSSSRRRALSATTMEAAVGTSRNVGRIVTTGVKSPMNFCLGLAKGFRNIPRLYNDDTVRTVEKVTDFNSGVRVASKELGYGLYDGISGLVTQPMRGAQKDGAAGLLKGFGKGVGGLIAKPAAGFWGLPAYVMQGAYAELNKFLSRSVQNYIITSRVVQGERELQMASEGEKADIVNRWKHDAELGALYQRNAKGQERGHSRISSGDGSSFWRSPLSEGRRQLGAALGDSKQQQPSRTMERSYSPVRKSADTASVADTEYEAAIRASVMETSRGDVEEDAMIEAAIRESVKAMRQQGSLPDPVDLAATVKHHDLFEDEDYKITDEEYQNLIEQALRESLVGHAADPSVAQASSSNQELDAGKSAPPAYEGHTRSSGSAFTPMSDEDADLQRAIEESRRPPPTLPPRISPSQQVEDDEEEEQLRRAIEESKNEMERAQNKRTEEDIVLEYVKKQSLAEEEYRKQHLAKGKGKEVADAADDDDEEELRRAIEESLRLSGEGSSAPPEA

SEQ ID NO: 7858 - protein, 403 aa, Streptomyces viridochromogenes
MTAGSRGDVAPYTGLGHALSRAGHEVTLVTHGCFERLVAGSGVRFHPLPLDPRAELESARGRSLHRSATGLGKLVRVVGMARALAGQMTDDMLAAARDSDVLLLAGSTAPLGHAIAEGLSLPSIEVPLQPLAPTREFGPPMLGGGSWGAVGNRVAGHGVSLAIDRVFSAAVPEVRTRLGLSRTKPRTTRRGRALHGYSSLVVPRPSDWPPHLEVTGYWWPYDGAAQLPDELREFLDAGPPPVFVGLGSATVPDPARLSAEVVRALRRAGQRAVIQRGWGGLEAAGDDVLTIGEVPHSALFPRMAAVIHHCGAGTTGAGLRAGVPAVPVPVQFDEGFWAGRLVALGVAPRAVPLRRFTAEALADAVRRATSEPSFGRRARELADGLRGEDGFAPVLDAVNRIGG

SEQ ID NO: 7859 - protein, 405 aa, Streptomyces scabiei
MTAGSRGDVAPYTGLGHGLARAGHEVTLVTHARFEPLVAGSGVAFHALPVDPRAELESERGRGLHRSSTGAGKLYRAAEMARSLVGRMAGELVAAARAADVLLLAGTVAPLGQAIGRGLSVPSLGVNLQPLAPTREFAPPMTGVRSWGPVGNRMAGHAVNAAVEWIFKGEVRRLGTEYGLAPAGRAGALRGGDRPVLHGFSPRVVPRPGDWRAGLDVTGYWWPYDGEDLLPAALLDFLDAGPPPVFVGLGSATVPDAGRMSGEIVRALRAAGLRGVVQRGWGGLRGEGEDMFTVGEVPHSLLFPRMAAVVHHAGAGTTAAGLRAGVPAVPVPVQFDEGFWAARLVALGVSPGAVPLRGFTPTALAAALRRATTDPSYARRARVLAEELRGEDGVRPVLTALDRLA

SEQ ID NO: 7860 - protein, 988 aa, Rhizoctonia solani
MKKLKLHRSREYNTHAPPTDPVSGTALPMLRLVNDFVHGFVKIGSRRPDKGLVKMVTASAAGFQTTLQGMTEGLTNVPKIYGSEVRDSKKVTGLVSGVVEGGKGFAYGLYDGITDLVREPVKGYKEKGALGAVAGFGAGALNLYLKPGAGMFQIISKPIEGGVKDLRGLFHKDDSQRRVSTNPFESTISPYTTASHSQDSLHEAAAQPPPTYSPSVSGSTARTGMFITNGWPDLSVELLDSSAAGSSAYPREKVHLPEYHEAITTEATIQSDGRIQASFAPALGFPDGCVPPIYKPGLDEDSFLNAPAMNINIMIVGSRGDVQPCIALGQQLQEYGHTVRISTHETFRLITKSAGLMFFNIGEDLNELMGYMDCNAHLIPGLDSLMGGEVGKNHQIIAEILDRCLLSCYAEDESSQGEPGFAADLIISNPPTLAHIHCAEALGIPLHLSSTMPWSPTAAFPHPLVNVKQNDEAELGMANYYSYRLVDMMAWQGLGRTINKFRTKRLGLEHLSTQSAVGLTERASVPWTYFISPTIIPKPADWVSNVDVTGYCFLNLAKEYNPPRELVRFIEAGQQPIYIGFGSIVLENAENITKSIIAAVSQVGVRAIILTGLGELDESMIQVAGDDIFPLTTEVPHDWLFERVSVVIHHGGAGTTAIGLKCGKPTIIVPFLGDQPWWAVQVVRHGAGPPPIHPNKLTAEALAAAIRVAMSPETREVANQIGGIIRNEQGPKNAVESIHKHLPLLNMRCDLDPNRVAVWYSSAHKLRLSAFAAQVLAEAREIDINKLELHRSRERGAAKLPSQPGKGATKVLSASTLGVQSTFQGAAEGMHNLPKVYGGEVRKHKKVTGIGSGVVQGGREFALGLYDGFSDFFMEPVRGFKRRGVLGAIGGVGIGALNLTTKPTAGFMQAISMPIEGAVKEVKSLLHRQVGKDRIATRYAEGVSAARNASEAEREKVVRAFVERVSGNGSAWMVDKKGKGKAKMTWKN

SEQ ID NO: 7861 - protein, 1589 aa, Metschnikowia pulcherrima
MSTAGPQLPAVPKSGENRPQSVYTEAEPAHVQVPESSDWHDQIKSASRLLAMAMDRLGLEERHENLSKASPFYKKVSLAVFPPFKASLNYIHAQTEPGHAETTGNAEVHEEEDVALLVSDHQGLTSILSMLATALACAGATSLKAIGSILHDRYRDEDEGGSDSEGKQKGPESNSGEKAPVLQPHHSLHEEITQGKEPLLRPTSRLNGIRPLAGLGAPGGSLRKSLVPASLTGGTTDELRLMYLSEIMAKALRNGDYRPPPENLRSPWENSVMANHHVQSSGDHALITYETADDGLSGESPEKTEILKYHIALKLKETFAFEDDNYLYDHFDVWLVKDVLLQGHMYITRDAVCFYSLLPGKFSVKELNDPELTVHSGALGHKLAHYGDAFFLSVYTNRFWAVLKPTTLSIYTSPTKLYFPVRTIDLHTAISCEILEPTGANLQSAQNSPNMGTPTEPSMLQINSELASIALDDAHEENVQAGVWFRVTCTDKQYRFHTSSIYLARHWYNSISKAIFALRNTNAQREVIMRLPIEDIVDYKKNFVLSDAETAELQAVPSPQDDEAPISFSIKFNLPQSTEDSKVQKLKQKTKKIGDAHSLHDSAHFVAFQKGADLSRTFERALEENVLDSAEKNHKLKKRAKKFFRDDRTDSGSLHSKTAYRVVTTVQPEYLSSLSVIDKIVEVNAKILQARVKMEEQANETVDRGNEAEKKFSYVPNFKGMKDRLMPKTSPIAGLANLGDGLLDVFRQEDESLAPLQDFEIPDFDYHLQLPKPFSLQMLKNLDIQMVRKRRSFDDIAGQYGNLLEVIKEKRAKDKAFARQPIAEETEYDVAHDGSESRLEGRMGSPISETRGKLRSLKRLLRTVSTIGGVWSARPEHFDLVIGHDKYFIRSKREKVRALNRFRKHFSLGPDSHLVSTYFAHLKRTMPVYGRLYIGKDQVCFRSMIPGVSTKMVLPLRDIQSCKKQARLYHYAGLLLKIRGLEDLLLAFGSKDSRDDCQKMILKLLRKEDHFNPDSEFIQDNQLDSSMDIDETERQNKRSDELANLRIHAARLRLLEDKVSYATGIEMPLILEDNPFTTIEVKLAKCYRITLLTIGSRGDVQPYIALGKALVKEGHEVTIATHAEFEDWIRKHGIDFREVAGNPAELMLLMVTHGSISVGFLKEASTKFRGWIGELLESSWKACQGAELLIESPSAMAGLHIAEALNIPYMRAFTMPWTRTRAYPHAFLVPDQNRGGSYNFLTHVMFENVFWKGISGQVNKWRQETLGLPRTSLVKMQQSRVPFLYNVSPALFPPSVDFPDWVKVTGYWFLNEGSDEYEPPKELVDFLEEAKQNGEKVVYIGFGSIVVSDAKALTKTIVEAVLDSGVKCILNKGWSDKLSKSKDDIEVELPSQVYDSGMIPHDWLFTKIDAAVHHGGSGTTGATLRAGLPTIIKPFFGDQFFFASRVEDLGVGIALKNLNKKSFTKALKSITSQEKYAVKATEIAKAMSHERGVLSAVEAIYTELAYSRSLILVIRHNTEQKKSNDDKSGVQTPVIGEEDFDMINGMEDDEANEEQVREEHKGESKAKKDKADQKRVDGDIEDIKNQIGI

SEQ ID NO: 7862 - protein, 1352 aa, Thermothielavioides terrestris
MELPERLRDHGDQVDGEEEVLRPQGYGGGLFMNMNQSIFGLIAAAGSQADYADRFEGHSSEDEDEGERRMAETIAGPTALQPESSSARGLAQTTVLPRHDAHDAADVKAHGRHLRKLSESRLLRSVPGLARFAGKIRPSKSFKPKSDDGAQGAEATQSAPQPTPDLMPSIQITRTDSMMTAPARTPQAYDLDGSNESPQDAETSKTGPSELAKKLKEIFGFDKEEEVVEEYPCWLLQHVLLEGHMYITARHIAFYAYLPKKANEVSKKGYLSKCGKRNPKYSRYWFSLKGDVLSYYLDTKNVYFPYGQIDLRHGISAVITDGDKEGTHFTVSTDHRTYYFRADTAQSAKEWVKSLQRAIFRSHNDGDSVKISLPIENVLDVEETHMLNFADTCKIRVIDNDETYAIDEYFFSFFSYAREAINILKILVEDSSSHAHGLSDQVEPSSERTSTSGRREQASNLPHLRTGKISEGVRATLSPLSPVRGSSPSPRQSSDRPRSSFDRFRAFTRGSMDTNANIHPGSPRRRSFSHGRRSLSRKRHEGHERQESSDSYVQSLDPSQASLSAMVASASSEDASASQILRGSEVFHGPTLQHAGPSTRAGHHASDSKPPTRPATAPRQSTDAGETDGRATTPTLQSIATMGGYPLRKANALMGYLDRQSRRMSNLLATESMGYVEKVSGMWKGGAKHYDEPPELRTDEEDGALGPEEKAHSEARFRAHFTLPESEKLQAAFYAHMMRVIPLYGKIYISDWHFCFRSLWPGTRTKLILPLRDIENVDKEKGFRFGYAGLVVVIRGHEELFFEFGKAEVRDDCTITILQGLEATRYLRGSSLMDGGESEDAQAAVAEHNALEKARSQGFADHEVQLPRETSSVSEAPTIIFDDPKASFLNFKPSQPMKITCLTIGSRGDVQPYIALCKKLLEEGHHPRIATHGEFKPWIESHGIEFAYVGGDPGQLMQLCIQNGTFTWAFLKEANAKMRGFLDDLLATSWQACQGSDLIIESPSAMAGIHIAEALGIPYFRAFTMPWTRTRAYPHAFIMPGQKMGGGYNYFTYVMFDNLFWKATAGQINRWRNRMLGLPATTWEKLQVNKVPFLYNFSPYVVPPPLDYSDWIRVTGYWFLDEGGEKWTPPPALMRFIEQARADGKPLVYVGFGSIIVADPARMTQEVIDAVLKADVRCILSKGWSDRATNEKGDTVKAGAADDSSSKSSSKKAEPELPPEIFLIHSAPHDWLFRQIDAAAHHGGSGTTGASLRAGIPTIIRPFFGDQFFFGSRVEDLGVGICLKKWGANSFARALWEATHSERMIVKARVLGEQIRKVSRYLLSLVEHLFFPPFFLHNHPYPRHLSRTSQTR

SEQ ID NO: 7863 - protein, 1465 aa, Dothistroma septosporum
MASQSSILPDRRRSSGGVKTRFGSIKLAKVRSRERSAGPSTAAMDLPDRFKSDDDEDVDDGTGMAGQDGPMFAQQSMYGVLAATQGKANFRFQQESGSESEGEDEESKRKRSEDAVRPSAGGSGRSTPRQHERKKSSDSKKDKGEEKRRRRKLSETKLVRSFLKPVRERVDSNAPDPMSQSQFLPPRKEEAYEDLQPVPALARKDAPILDRKLQAMAKADMDSSRASLEGHKSKDGKTGDINMDRMPKTLPQVIANIFQFSEPEEVASEYPCWYLQNVLLQGYMYITQKHVCFYSYLQKRTNVTVKTGHLGKQGKHSYRFRQYWFVLKGDIFSYYKSSAEPYSPLGVVDLRYAITADVTGGAGKDYTEFTITTHERVYLYKADTGDSAHEWVKQLQKVIFRSHNDGDAVKISLPIKNVVDVEEASMVDFAETIKITVIADDETFATDEYFFSFFSLGKEALNMLIILTEGNEAKKTLADDSGMSPLTKARSSPTFDQSANVRSSPRPRQEPARSTLSPLSGRSSPSISSEGKRSSTDMTRPSLDDNKSTSDDRGGRSVSADSRGRYGVRGASKAPSSPRIDDSTESFVTSSEQPTDSSVDEDTMQANMTASTMLAEDGVFAGPTLRMPQPRRLVSGSTVEKLRRQSQHSSLESSAECAIVQSPSRQQPDQSLAHQPDIKRTESGGSGRTLEAERLQPSEAAATGRLARGISTPLQRAMTVAGMVRSSSVRMGSYLSSSPKTTLSNWSDAIAGGKRNYKDAEGLAPDDSIQDPEQEVDIAEHERRFQAHFGLPISEKLVSAFYAWLHKTIPVYGKIYMGTRRFCFRSLWYGVKTKVVIPYKDIINVQKQRGFRWGYPGMVLVIKGHEELFFDFPSVGLRDDAAVTVLRNLETVQDAATSMILTEEEQQEAEDAAAENASLQAARKGGSADHDLQLTPGLSERDAPPILFDDPSASLLEFKPEVSMKITCLTIGSRGDVQPYIALCKGLLAEGHKPRIATHKEFKPWVERHGIEFAEVGGDPAELMRMCVDKGLFTPSFVYEANSTFRPWLNSLLKSAWEACKGSDLLIESPSAMCGIHIAEALEIPYFRAFGMPWTRTRAYPHAFAIPNRKMGGGYNYMSYTFFDNMFWALISGQINRWRGKMLGIGPTSMDRLQQNKVPFMYNFSPSVVVPPLDFSDWVKVTGYWFLDEGEDWQPPEDLANFIDKAREDGLKLVYIGFGSVTVADSRLLEQQIIDAVLKADVRCILSKGWSDRFESEAQKALPPIEFPACIHQIRSAPHDWLFKRVDAVVHHGGAGTTGASLRAGVPTIIKPFFGDQFFFATRVEDLGVGIYLKKVTANQLGKALWIATHDSRMRGKATLIGEQIRAENGVRTAIDTIYRNMDYARSLIRKGGRQGSVTSQSGVEEETEENWTFVEKDNEAEAIAAFAQIEAAMMGQQPQPQPQGKSGNHGRQMSLGGMAMRGRH

SEQ ID NO: 7864 - protein, 405 aa, Streptomyces kanasensis
MTAGSRGDVAPYTGLGAGLVRAGHEVTLAAHAVFEPLVAGSGVRFHPLPVDPRAELHSERGRRLHDARTGAGKLVRLVSMAREAADDLTAALVEASREADVLLVGGALGPLGYAIAEGLSVPAVGLHLQPLHPTGEFPAPILGTRPLGTLGNRLSGRAVTTSVELVFAGSVRTLRRRHGLTAAGRKRGTRAARPVLHGYSELVVPRPRDWPAGLDVAGYWWPHETGRTLPRELEDFLAAGPAPVFVGLGSATVPDPERVSREVVGALRAAGLRGVVQQGWAGLAADGEDILTIGEVPHALLFPRTAAVVHHAGAGTTGAVLRAGVPTVPVPVQFDAAFWASRLTALGTSPGAVPLRRLTAGTLGAALRRATEDDTHRVRARELAARLAAEDGVAPVLATLDRLAR

SEQ ID NO: 7865 - protein, 424 aa, Saccharopolyspora erythraea
MRIAIFSFGTRGDVAPFTGLGARLREAGHEVVVGVHDSFAPMVREAGLEHRPLAADARALLAGEVGKRLRDYGSGVRGIAEQLRHVGDFTETMNELGESVVEAARDADLLLLQSGTLIHGYTVAKAMGIPSMLTELFPSQFAATGDFPPVKLGPVSFGRWGNRAVGRVMPVAAGPFVGFVKDFQRRMGVPSNGLAGLYREIERVRWPILHGFSPRILPRPSDWRPGIDVVGYWWPHWNPDWQPPAELVDFLESGPPPVFVGFGSMAQGEGERLSEIVTEAVRAARVRAVVQAGWSELTATGDDVLAIGDVPHEWLFPRMAAVVHHGGAGTTGAGLRAGVPAVTVTVLADQPFWADRLARAGVSPGWVRLKQLSAQRLAELIGQAVSDPAYRRRAREVADGVRAEDGAGRVAEAVAELATTTGKQ

SEQ ID NO: 7866 - protein, 1414 aa, Agaricus bisporus
MSQHCPTDSPLARSLSGRTKRLSFAVEKTVDKLSKSVAAKLPSQSPSVPLPRRRIFSLSRRSKPQSPERDNTVSPSSVPDSSDLLSVRATASETTVTQHDDCPFVCPPSPPVRPTLDTYCGEGSMRMGTQTFIQALQALPWTDPDNEEEGSSHEQDAVVSESEDEIEDNGRVDQLASSIHAIHRPLARSRKRDLPGKSPLAETVAEETENYLSDEEVEHDFEEPKTFEERPALIQSQSLPLPGNHGMNASMSLFTNTRRETMSTIRSHRRTRLAEKLRDVFELEGIQEVLAEMPCCLLRSVLLQGYIYLTNSYLCFFAHMPSREDQVLKSGSLNKRTQRTKRSLKHWFILKNDVLSWYQTSSDPYFPRGIIDLRYAISCEPVGEKAFRLRTSQKTVLLTADSIPSRDEWVKAIRKVIFKAQNMGDTVKIAIPYSAILEVDKSSAMDFSETIEVKVFDKEGNYLIDSYFFAYFHNLSAAIERIRDAVRNVRDVPEGELTPTLLDTTAARSSITVERSNTTSEVGTTRSSFSSFRLSSILRPISDTISLARSSGATSNPEPSIKAEDFTHITPRANSFIPITESPKSADIPTMLPSPTQETVEDAPNPQTQSLDHTYPPSIPPQSSCPDFPSFRSNSWAVGVPSWLKTRRMFSLGPQAQSLSASAGVKEVCSSPTVMPPVPTSKGGWGDMAFSILETPQIPIDSDVAEKFRTAFAYDEKETLLGYFPGYIFRLLPVFGRLFISTNYFCFKSSGQIIAKTRMAIPIRDILAVQKSRATRFNQHGLVVIVRGHEELFFEFGTEEKRDSFILLLERQMEDVRKRISAGDPVNSAGERQALILEELERKDSTASSVELAAHGPENMTDSLPAVMFTSASSTFLTFKPSQPLRFTFLTIGSRGDVQPYIALAKGLMADGHKCRIATHGEFKEWIESHGIEFGYVGGDPAELMRICVENGTFTVAFLREGLQKFRGWLDDLLKTSWEACQGTDVLVESPSAMGGYHIAEALAIPYFRAFTMTWTRTRAYPHAFAVPERKMGGNYNYMSCVMFDQVFWRAISGQINRWRRNILNLSPTSLDKMEAHKIPFLYNFSPSIVPPPLDWPEWIRVTGYWFLNDADVSAKKWTPPEDLIQFIDTAHQNGKKVVYIGFGSIVVSDPKTMTKTVIDAVVQSGVYAILSKGWSDRLHVKNSDTNEIEEPLPSQIYPIQSIPHDWLFGRIDAACHHGGAGTTGASLRAGIPTIIRPFFGDQFFWADRVEALGVGSGVRKLTVASLAEALTSATTDPKQVERARVIGEQIRSENGVATAIESIYRDLEYARSLIKRPVVEDAEEDDTEHSTIRNTDPSPGHTRSPSTTSGHSSTASLRAAPSEDWSVISDQEGQEGERNSPDSSPSNEGKGLRHSPMKRTSIAAAMLSVLPDL

SEQ ID NO: 7867 - protein, 444 aa, Nitrosococcus halophilus
MRIGIQTWGSEGDIRPFLVLGGALSEAGHSVTVVVTDLDDRDYSSYEERLGIQVRHVMTPVISSPTELERIGELILRENHPARQGKLIIDQLFLPTVPELYDAALELCSGSDLVIGHFMHYPLRIAAEVYGIPEFSVTLAHNLIPSRYIVPTGVPDLGRWANPAWWWLIKKLLNQMFLAEVNGLRRQAGLPLAKDLVTAWQSSKLNLVAVSSSIFPRQPDWTAEHQVCGFLGFSQARDKDSIPSVIEDFLAEGIPPLFMTFGSLTPKSDQAWPQTLELFVDTVRRAGCRAIIQGWPDSGVSVLLDNRILLCPPPLPHYLIFPHCAAIVHHGGAGTTHSTLAAGVPSIVVPHVADQFFWGKELKRLGVAPRPLLRKKLTAARLARRIQATIGSLAMGDRAAQLGQLLRQENGPINAVRLIQRAMGELGAKGSSTLSDTPSATTVD

SEQ ID NO: 7868 - protein, 453 aa, Streptomyces malaysiensis
MRILIVTAGSRGDVAPFTGLGRRLLDAGHEVAVAAHAPFSGLVRGCGLDHRPLPGDPRELIRARGRTASPGEARAVTAAFLDRLADGVVGAVADGTDLVLTAFGPAGLSRAAGEACAVPVIGTYLAPSFATREFPLPGASGAAGGPGALGVHGVPGGPGVPGGPGAPGGPGAPGDGGLGPEGNLAAGRELLVRAGGLQAEVLTRLRARLGLPATASPEPDAEIRPVLHGFSPLVVPRPADWPSQVDVVGYWWPARPRDWQPPAELTDFLEAGPPPVFIGFGSMAPGQGERLGELVTAAVARAGVRAVVQAGWAGLTASGDDVLTVGDLPHDWLFPRTAAVVHHAGAGTTAAGLRAGVPAVAVPAMADQPFWAARLHRLGVAPRPLPLDALTAESLGAAITACVTGTALRRRAADLAEAVAAEDGAAAVLAHIGAVGRGEAGHGDRTSGEPGAS

SEQ ID NO: 7869 - protein, 1553 aa, Neurospora tetrasperma
MASSQPTSSGPMLNSPPSPNPQSQPNSELSSSQHRANPSEAPTQAGPGPARPSALTKRPSHREVAAYRMSWKLQRLRGDSDQPHSPTMELPDRLKDNGKEEDNEEDVLQPQGGMFMNMNQSIFGLIAAAGSTVDFHDRFEGQSSEDEDDVPNHMAMTFAGPGIKGTARNRETAGTVKSLSQTVVFNKPPASATADAGPSNTHRRRPSGHKLLQSVPGLSRLASSHKSKKSKQHKGTAMADHKIEEEEDPDPSSPLPPLSKDETKSLGLAPPIEIVRAEGNGAPLMSRMLEARAEMAARPSFDLDRLSGEHRRDDAGVTGQLAKKLKDIFEFDTAEEVIEEYPCWLLQHVLLQGYMYITAFHIAFYAHLPKKAHEIAKSGYLSKSGKRNPKYNRYWFRLKGDVLSYYQDPKDHYFPAGQIDLRYGISASVNDKEKEGNYFSVTTHHRTYHFKADSARSAKEWVKSLQRVIFRSHNDGDSVKISIPIRNILDIEETQMVEFADTCKIRVIDNDETYAIDEYFFSFFSFGKKAIQVLKILIEDPSPEDSGANDAPKKTGGDGAIGDNLGSPRTRTFSEGVKATLSPVSPIQIASPSSRASGDYFKSSFDGTRPFSRRSFDASPGTAGYAGSPPRSLHGDGRRSFSKPRHEPHASTDSYAQSFDDPSQASLSALVASGSEDQSASQILRGSDVFHSPIFRRSASATRATTEGEGVAAPPIVRQHTAGLVRLHRPHHAATTGQIGDHMAEAQGGPSTPMLQSIATMGNYPLQRANAFMGYLDQQSRRMSNLLATESMGYVEKVSGMWKGGKKHYDHPAGRRTEREDVEDDPEERALSEARFQAHFALPETERLQAAYFGFIVRVLPLYGKIYISNRHFCFRSLLPGTRTKLILPLKDIETVDKEKGFRFGYSGLVVVIRGHEEIFFEFAKAENRDDCAITIIQSLDAARYLAESQEVEEAQAAEAERDALNQARNEEFPDHEIELPRQASGVSDAPTILFDDPKASFLNFKPSEPMRITCLTIGSRGDVQPYIALCKRLLEEGHHPKIVTHREFKDWIESHGIEFGPVEGDPSELMRICIENGTFTYAFLREANSKFRGWLDELLTSAWEACQGSDLLIESPSAMAGIHIAEALGIPYFRAFTMPWTRTRAYPHAFIMPGQKMGGAYNYITYVMFDNVFWKATAHQVNRWRNKYLGLPNTSLEKLQPNKVPFLYNFSPSVVPPPIDYSDWIRVTGYWFLDEGGDKWQPPKELTDFIAKARADEKKLVYIGFGSIIVSDPAKMTQEIIDAVLKADVRCILSKGWSDRSAAVDGVEKPKVADPSFPPEILQIQSAPHDWLFQQVDAAAHHGGSGTTGASLRAGIPTIIRPFFGDQFFFAGRVEDLGVGIYLKKWGVQSFARALWEATHSSRMQMRAEVLGGQIRAENGVDTAIQAIYRDLDYARNLITLKRQKHQSRRNSVATPTPGAKPNAPEDDQGQEAEEDDVDADDEEEENWTFVGGNEDDLTGSMSMSRSDMLSQTVADLRGVKVGKAPALGSRVLSSPSTSPGAMRGAGGVKYV

SEQ ID NO: 7870 - protein, 415 aa, Unknown
  Description of Unknown: Clostridiales bacterium oral taxon 876 str. F0540 sequence
MITILCSGSRGDFQPYIALAQQLKKLGKEVRITACKSVKGLIRSYGIDVYPIEADIETLKVDPKLLKAAGSSDNPLKMMFTFNKMKEYGIYMVNDYYSACEGSELIVYHPGCTVGYFAAEKFGIPSVLASPFPMHKTKEYLSVVMYGKTKSNALTKKISYSMIQGMLWMASKSSVKGFWKNNFGKIPDNFGCPFERHTDKKHPAIVSCSNFVFKRPEDWNENIHQRGYWFVEESYDYTAPKELEDFLKSGEKPVYIGFGSMTSLEQHEGLAEIAVEAIKKSGKRGVICSMGKPKDLPKNIIAIDSIPHTWLFERVSAVCHHGGAGTTAAGFKAGVPSIIIPFSNDQFAWAHRAYDLGVDAKPILKKELTSDKLAEAIKFALTDKIVANAKSLGRNIAKEDGALECAKTIVKCLER

SEQ ID NO: 7871 - protein, 1416 aa, Cylindrobasidium torrendii
MALQPTLQPILHDPDAAPPVDTSPEVLGIDVDSPKAVSGKRSVRLSSSFSGIGRNKSGRTPPGSPPASETKSPRRLFSLSRKGKGKSSERGDNEPSSPSSTPGASRPTSPLPNDDSSFNSPPSPPSANPRSLWGSFRGDGSVRVGTQTLIQALQAIPWTKDPDNDDEIMNHGGTVQASEDESEDDDRPGQSPPHMASSIHTIYRPIARLRRSTARDQRWNGLASHPEDQLPGLASEDEDHATRSEDEADDFEMATPRPAATPTAAPAPSIALSRSLRQGSMATVRLQRRAMLAEKLREIFELDDIEEVRAEMPCWLLRSILLQGYVYLTNSYLCFFAHMPSKEDQVLKSGSLSKKASRTKRWIKHWFILKNDALSWYQSSSDPYFPHGIVDLRYAISCEPSGDKQFRIRTNQKTVSLYADSTPSRDEWVKAIRKVVLKAQNMGDSVKIAIPYDAILDVDKSSAMDFSETIEIKVLDKEESGAFSMDFYFFAYFHDLPAALDQIREVVRTHRATQRDSSSTPRAVLDSTAPRTVLPSISTPAITDANYAKPSPSTFRISSLLRPFSERPVAQVAEPPVDLHEEFTHINTRSSSFVPTTESPVEDEEMTPRAGNQEYHHTYPPSTSLTSTLDPDIPSLTRREASSSWNVGVPGWLRGGRTSRLFGSYVTKPVKEIYSTTSSSVSGSRWSSVGGDMAVSVLDNPPVDIDPEIVDKFHTSFAYDDKERLLGYFPGYIFRLLPVYGRLFISTNHFCFKSSGPLTSRTRMALPIRDILSTEKSKATRFGHHGLIIIVRGHEELFFEFNAEDKRDAFVALLERQMDDVRGRVASGDLPSQGKFDALVVEEFESPSEETDDNMTDSLPPVMFTSTSSTFLTFKPQKSLHFTFLTIGSRGDVQPYIALAKGLKADGHRVRIATHGEFKEWVESHDIEFRNIGGDPAELIRICVDNGMFTLSFVKDGLNLFRGWLDDLLKTSWEACQGTDVLIESPSAMGGVHIAEGLGIPYFRAFTMTWSRTRAYPHAFAVPERKMGGSYNYMSYVMFDQVFWRATAGQINRWRRNILHLESTSLDKMEPHKIPFLYNFSPSVVPPPLDWPEWIRITGYWFLDDAEVSADKWTPPEDLVAFIDNAHALGKKVVYIGFGSMVVSDPKAMTRCVIEAIVQSGVYAILSKGWSDRLHVKSMEASEVEEPLPKQIYAITSIPHDWLFRRIDAACHHGGAGTTGASLRAGVPTIIKPFFGDQYFWADRVEALGVGSGVRKLTVDGLRDALLSATTDPRVTERARLLGEQIRAEDGVATAIEAIYRDLDYARSLVKRRQTTGSSGDETEQDTIREHRRQPSASPTGLDSSGYSSAGGAASEDWSVISDAEGDTRRSSISRDASGRSSKRNSAFTSAVLSVIPDSFKPSSPRKRAASIGSRT

SEQ ID NO: 7872 - protein, 1327 aa, Talaromyces marneffei
MASHDDSEKKRVSHRIRSLSKSLHRLSSNNVPDRLKNNDDEQEDFTAPPKNLAGRDISYMHQSVFSLIAAAGSRSDFHSRFDESSDSDGEDSEGKKRPDPLHRRLVGRLSNRTGKELSSSQVIPEEAGQEARPSRKPSTSSVNSHRRTGSGNRLLRSIPSIVPKRNDKEGKPDQVTQAAQSPQDESQPAQETSKTTPRTAPILSRMIEAQTRFDPAALSTEEHAQAEKEADDKQSDEQKSKLLLPIRLKEIFGFENPEPVIGEYPCWLMQNVALQGYMYITEGHICFYAYLPQKSNVAVKSGQLSKRGRKNPRYKRYWFSLKGDVFSYYEDPSKLYFPSGHIDLRYGISASLADKEKGKDTRDFTVTTDQRSYFFRADSASSANEWVKALQKVIFRSQNEGGRVKISLPLEDVIDIEESPMMDLAQTFKIRVVDIYETYAIDEHFFSFFNFGQDAFEVLKGLINDSTARRIAQDPAATQVLNEVVSESYRQRADSSASEKPDANLESSSAQKSETSDQNHESDSFVQSIGQTESSLSLQSHPDTIVTASQILTRDDVFNSPTIHSLRPNTSLEASAPTIHELVKAGTYPLQRAAGFAEYLKSRSRQMSSLLATESMGYIEKVSGMWIGGGKHYAEGEDPALEQYFDGEDAETSGTYGDRFRAHFALPPTEKLQATYYGYLHRVLPLYGKIYIGNSKFCFRSLLPGTRTKMILPIKDIENVEKEKGFRFGYQGLVLIIRGHEELFFEFNTADSRDDCAVTLHHRLESVRFLAQSSILAQKDKDEADAAKAEQQLLQEATQAPPIEDSQEVHPIFDDPRASIVNFKPTESLRITCLTIGSRGDVQPYIGLCKGLLAEGHRPKIATHAEFEPWVRQHGIDFAPVEGDPAELMRICVENGMFTYSFLKEASSKFRGWIDDLLTSAWNACQDSDVLIESPSAMAGIHIAEALRIPYFRGFTMPWSRTRAYPHAFAVPEHKMGGAYNYITYVMFDNVFWRAISGQVNRWRKMELGLRGTTLDKMQANKVPFLYNYSPSVVPPPLDYPDWIRVTGYWFLNEASSWTPPTELVNFIKKTREDGKKIVYIGFGSIVVSDPAALTRTIVESVQKADVRCILSKGWSDRLGDPKSTRSEVPLPAEIHQIQSAPHDWLFTQIDAAVHHGGAGTTGASLRAGVPTIIKPFFGDQFFFGSRIEDLGVGICMKKLNVGVFSRALWEATHSERMILKAKLLGEQIRKEDGVGNAIQAIYRDLEYATTLTCQRASLSATPLSPASATGENPATEEGEEPEDMEGEESWTFVDDYADPELLKNENLFYQKNFTYSPASSPTLANR

SEQ ID NO: 7873 - protein, 1386 aa, Erysiphe necator
MAVEGVEGLTMSKNYENKKFRIPEKASIPERFQDEDDVEEDCTAPSGTNTYMSQSVFGMLATVGPQIDYTARFHIQSSDDEESEASPQNAEARETRIPDGSHFNKPVKLRKKFSRHKLLCSVSELGSKSTSTPSSSDLNKRSSVRPKKIAPSSSSYLPVRPAMVMSRMLEAQEAMNLRPDSNAPIMDMNVKEKEEHIRNCLSRKLKEIFSLETAEEVIEEYPCCLMNSVLLQGYMYITKKHICFYAYLPKKSNEVVKSGYLYKSGRRNLKFHRYWFRLKGDVLSYYNDPSDLYFLRGNIDLRYGISATVASKENSKDAVYFNVVTHQREFNFKADSVASAKEWVKVLQKIIFQSHNEGDSVKISLPINNVIDIEEIQIIDFADTCKIRAVDNGDTYAVDEYFFSFFSFGKEALSLLRRVVEDTTAQHIPDEVLGISPNKKSDPGDEISSSKWNCGLSPKGKKPVSNSLPQIPNVPLLEENVRATLTLIENTTPRVSSEINQVSYDGGRRSLDQKSTARSGISPFRLERDVTKNKPKSPNEKIAKLNGEPLNNDNLSRTSCNTSATEGQILKSSETLFPPEIEQESQTISIIENKTDPLSNKTPVISYTRPSNDLAMEPLLDENECSVTTPTLQSIVKASAYPLQKAAGFAGYINKHSRRMSSLLATESIVYAEKVSGMWKGGKKHYGESHGLESEYLYEEGDNEDIISSIERFREHFSLPETEKLHATYFGFLNRVLPLYGKIYISDQSFCFRSLLPGTSTKLILPLIDIENADKENGFRFGYSGLVVVIRGHEELFFEFPQSETRDDCAVTLLQKLDTLRFLRESGQLAIKEEENAQNAVNEHLALQQVRSKRFDLNLSEKLKEKNIESAPITFDDPRASILNFKPNESLRVTCLTIGSRGDVQPYIALCKGLLAEGHQARIATHIEFKDWVESYGIDFKAVSGDPAELMRICIENGMFTYSFLREASSKFRGWIDELLSSAWVACQDSDLLIESPSAMGGIHIAEALEIPYFRAFTMPWTRTRAYPHAFAVPEHKMGGAYNYITYVMFDNIFWKAIAGQVNMWRKKQLGLYSTNLEKMQANKVPFLYNFSPAVVAPPLDYSDWIRVTGYWFLDEGTDWEPSKELTDFIDKAKKDEKKIVYIGFGSIIVQDSVALMTTIIKSVEKADIRCILSRGWSDRLDKKNAKKTEPPLPSSIIQIRSAPHDWLFSRIDAAAHHGGAGTTGASLRAGLPTIVKPFFGDQYFFGSRVEDLGVGIVVKKLNVSLFSRALWQVCNDERMIIKAKILGETIRKENGVDTAIQAIYRDLDYARSLIKRRSRKLTDDVLDDSEESWTFIGEEKDAELVLRLQNWKAKNVNKGNSPFNEREDDSDEGALQKNLIVENSV

SEQ ID NO: 7874 - protein, 1455 aa, Trametes versicolor
MAHNTPPGSPPTIPGSLPSTSASPASEPDSAQTPTLPSIGGLAQRTLDKTRDTPLLSQSQPALPQPGPMRMFSLTRKGKEKHTHDGDHATTSQSQVLASRPKSPSRLSSRRRKPATGGEEESPFITPSSPSLGPSQPENAIWRGFRSMHAGTQTFIQALQAVPWAEDQDNDDEFLNHNATPAEAESDEDDRPVNRLTSSIHAIYRPLARFRRGEPSSSTHPSARGHTLPTLSDTEDSAPSGDHPMSDEEGDFEPTAPDHVMGLSHTGRTSPEPILGLDASIMEIQELGSRERAAGRSANMATVRQNRRTQLAEKLRDVFELDNINEVVAEMPCWLLRSVLLQGYMYLTDAYICFFAHLPSREDQVLKSGSLLKRAQRTKRWIRHWFILKNDVLSWYQSASDPYFPHGVVDLRYAISCEAVNEKDIRLRTNEKSIRLSADSAASRDEWVKAILKVILKITNMGDSIKIAIPYPAVVDVDRSNTMEFSETIEIKVQDKSSDLALDSYFFAYFNNLPGALEQIRDAVRAYRTMPSFQHAPVVVDTTTARSPGPRPTVEHVPSTPDAGQHPKSPSGFKLTSLLRPLQETLPMGRSASTPGPSTGDTNNEDFTHIIKRSGSSFVPIATAAETTSPIEGEPSGRPDLLRASSSSLTPVPTPTPADHTYPPSMSGSSSDVHPHPHSAGSSTKDAPSGSGWSVGMPSMPSWLRVPSRSLLFGVPTLSGVRPHLEHAMTLPATHALPGVTEIVSSHSRGSSRSRFHTTSASASGDFGFFSILETPHDGVDAETVDKFRQAFAFDDKENLLGIFPGYLYRLLPVHGRLYVSSNYFCFKSTGPLTSRTRMMLPLKDILSTEKQKSFHFGHYGLVVIVRGHEELFFEFADEERRDAFVNVLQRQLDDTRQRIASGDTRSTSSGRQDALILEEFGSRDPLERSDSQGSLSESAAPAHMFTSQSSTFLSFKPDKSLHFTMLTIGSRGDVQPYIALAKGLMADGHRVRIATHGEFKEWVESHGIEFGYVGGDPAELMRICVENGTFTVAFLKEGVAKFRGWIDDLLKTSWEACQGTDVLIESPSAMGGYHIAEALKIPYFRAFTMTWTRTRAYPHAFAVPEHKMGGNYNYMTYVLFDQVFWRGTAGQINRWRRNTLGLPGTSLDKMDPHKIPFLYNFSPIIVPQPLDWPEWIRVTGYWFLDDADVGSKKWEPPQSLLDFMAEARKAKKKIVYIGFGSIVVPDPKTMTRCVIDAIVESGVYAIMSKGWSDRLVKNAPAQTEPEEPLPKQIYPISSIPHDWLFKQIDAACHHGGAGTTGASLRAGIPTIIKPFFGDQFFWADRVEALGVGAAVRKLTVDVLAQALRDATTNQKQIDRAKAVGEQIRAENGVAVAMEAIYRDLEYARSLIKGASHHDRDLREELFDAEHATIRDYPSGSPDEHPSPSGSATGPASDWSVISDSDEPSHDSHEL

SEQ ID NO: 7875 - protein, 1456 aa, Leptosphaeria maculans
MASQDRGSDRTSRRLTKKRKDGKKPMRDVSLDMPERFKDGDDAHEDVTAPKGNHTMSMNQSIFSMIARAGQQSNTDLGTMQEVDSGDSDDEGTRNVPYHILDGAARLSRLSTANDFQKTSGQTRDGKTEKGKHGRALSENKLLRSLPKLKIASRKDARSDGQGADQMSSSQFLPPRPSPEGSMPAPASSPPPPAAKGRVRPGDGIQMEKGRNVARKTRQRSPAAAATGEAPVSLAKRIQHIFEFAQEEEVISEYPCWLLQSILLQGYMYITQKHICFYAYIPKKHHDVSKTGYLSKRGRSKHNRYWFILRGDVLAYYTNPAELYFPRNRINLQYAISAEVLEPKRKGDEETSFVVTTDERTYQFKADSVASAREWVKSIQKVIFRTHNEGNSVKISLPIQNVLEIEESSILDFAETAKVRVIDNDETFAIDEYFFSFFTKGQDALNVLRIMINDNEHHQAAQKPVEPPSRALGQSDSGFMASTNAPSEVPHITENVRATLSPLTAPHVGRSSMSDISVRSSVDANRKNRDVRRSMDAGRTLRRWSLEGRRLSHEAHRSPSPSGHDKTHKGRVGDRSPKSPRATDSDSATFSLDPGTESSAAIQSMDDSTASASQILDRSDLFRAPVVSSPNAFSNGVNMSAHSQDTTRSSAPRPAYSKGTHPTTSPSIDPLSPGAPDGEYDTDAGGATRLSGSSSALQDIASYPLQKASGLAGFLRTRSKKMGNLLAAESMGYYEKVSGMLAGGRKHYNTAEGLETDDQVNVYEDDEDAAKATDNFREHFAFREDEVLQSSFFASLQRVLPNYGKIYISGRYFCFRSLMPTSKTKIILPMKDIENVNKEKGFRLGYYGLAIVIRGHEELFFEFGKAEYRDECAITVLRILENTKYLEDDQSSSSGVDSNDEAAKAEHDLLQQAREDNNVDKTKNLSEIVRAAADDRIPLIFDDPLASFVDFKPPEPLTIVCLTIGSRGDVQPYIALCKELLKEGHKPRIATHAEFEPWVRKHGIDFAPVDGNPAELMRICVEHGMFTYNFMKEANSKFRGWLDDVCSSSWRACQGADVLIESPSTMAGIHIAEALEIPYFRAFTMPWTRTRAYPHAFSVLEKKMGGGYNSITYITFDTIFWTAISGQINKWRRRELGLQNTSQSKMQASLRPFLYNFSPHVVPPPLDWPDWVRVTGYWFLDEADTYEPPADLVAFMDKARKDGKKLVYVGFGSIVIDDPAALTKTVVDSVLKADVRCVLSKGWSDRLETKDASKPEIPLPSEIFQIQSAPHDWLFKQMDAAVHHGGSGTTGASLRAGIPTIIKPFFGDQYFFAQRVEDMGVGVWLKKVNTSVFSRALWEVTNSQRMIVKARVLGQKIRKDNGTQVAIQTIYRELDRARSLVKKHAKLDGELSEEFEEDWTMVEDGEEIDVPHPFEVQQPVAGISQDASKMGGGSLVLGSMVLKGAQKRSPESAYRG

SEQ ID NO: 7876 - protein, 1519 aa, Sporisorium scitamineum
MGLRPLFGSRASVNDVRDSFGATVELVKSSESEHADPFDQPQHSHDAQPDSSQQPVSEQSPQQQAHQHQDRNGLAGLLNGAALMSNKDAQSKPRDRHDQDNLVPAESHQPAQPVSLDSSEDTAAWNKSRNEAETSDQHESARNRSKFGRTLKMVDAKIRSKIGVNPPPTAQELKSPYSIGNDDHLTSHNHQGAAELLNDAQLETLQHLSEDDDQDDQDEDDNDDDDDEEEDGDDHDQGLHDNAKKPNAAIIQEHVQELERTKNVAEHRRSGSMDGARPGDNIRTHAPTPISAEEKMKAIIEEFGECASVSAPNEPERLLIDHSGVLMKTVLIKGSLFLTNRRVCFLAYIPDAARNNDNGSEHHQVGLASSKNPSDVCAPSDPNVQNPILKSGPAVLHRPGKMRPKRRVWMELRKDSFNAYSASNKLYKPLLSTRLSNLYAVLPIDWAQPNIIRFVEGLKYSSVEFKTQEAALDWRKELEAAAFHARNTADKVRISIPLERIVGLDSASFMQVAKVIHIDVLIGAVNEAEAAHIAQEHRERVDRHQLDHSWSSGDVFLNCPKDPGFKCHTTQVAFGVTHNRTAFIDLLREALKEPASIHKSAGFHDTLRTVPAPLLDLESDADAEDTSTDGNASSDDQKSSLADKFCQAFGLPDRPEELHIVKAELVRTLHTHGTMAIGLDYLLFWRRAVGRDLKVKVPLNDLQGVDTYRSMLWHHFGLVVHITAHSDMYFDFTSKDNRDLVLSTLKNYIEAKQTQKNDAERASLNTEDSQATKVEGAAGAGTAQVLLHDSTAEVPVFEPEMLSYLPKVVNMDRTVMRDAIRISPMRIYCLTIGSRGDVQPYIALCKALKLHGHTPVIVSHPEYRGWVEGHGIEYRGVGGDPAALMKLSVEHRIFSPAFFKESIGKFRVWLDELLRECWEECQGADLLIESPSTMAGIHVAEGLGIPYFRAFTMPWTKTSAYPQAFSVPSIEMGPSYNSSSYTLFDQIMWVATSGQINRWRKHMVGIGPTDMSKMDADSVPFIYNFSPAVVPMPNDWGDRVKISGYWFLDNPESNWSPPKELSDFLARTKKDGKKIAYIGFGSITIENAEEVSANIMKAVHAADVRAIVAKGWSGRGGSKPKKKKKQAKHDCKPTLQHENCAASHTEGEETATEEEHEPEIEIPDDVFVVDSIPHDWLFPQIDIAMHHGGAGTTGASLRAGLVTLIKPFFGDQFFWANRVQKLGAGARVNGLSVSDLTDALKSAVQDRVMVEKAQGVGEKIRSEDGAATAIEFLYKNIPLANRRTQRRLEREASHPTSPSETRINPLSRFSSHGRQRSHDGQEAPHAHRASTLPSVSSSRPLSPSQDAPHRSTSTIVESPADEVESPTRTDSFASKLFSPLPSMPSMPSMPSFNVLPSSMSQLFKEMVTLNHDTNDTTADGEEAPNSLSKRSRTAPSGAITGDETEEHKMARLKGYKNAKAEDIRRRKLLLEKLEREKREREKEEKKEKKGEKEEKEEKKGEKAEKGETGEKADAASVQA

SEQ ID NO: 7877 - protein, 430 aa, Ideonella sakaiensis
MRVLLLTLGSRGDIEPFIALGIGLRAAGHEVTLGATRHLADVIEGHGLRHAPMDDGFFELLHSRAGREGVQRSGSITGMLSTTLRLARQLGPMQLQIQRDCWAAAQASRPHLIVHHLKLMGAPDLAHALGIPAVLALLVPMVQPTAAWPCPVLPRGPDRLAGAVGRRAGYHVVNALANRFGLGPVRRWRREQGLAPRPPAIDLRHDAARRPVGLLHAHSESLLPRPADWPPHAVATGFWRLPARADSPLPPTLLAFIEAGPPPVYVGFGSMAGRDPSGLARTVIDALAQAGLRGVLARGWGGLETTAVPAHVHLIDEAPHDRLLPLMAAAVHHGGAGTTAAALLAGRPSVVCPFFGDQSFWGRQLHEAGLAPAPIPQQRLTAARLAAALQEAVRSEPLRRAATVMAGRLRAEDGVGRAVDWLQRWQAGQR

SEQ ID NO: 7878 - protein, 1445 aa, Pisolithus tinctorius
MSRLVPRKSRTSPVSTDDARDPSSQGESGEQGREDHVSPQECIKRVAARTIDLRKSITGRMQSSPTSPESRRVFSSNRKGKGKDTPGRDQAEGTLHADSTQSQTLPERASALNSMDDSPFIRPPSPPPTLPDRPSLQAIQGVGSMRAGTQTLIQALQALPWVDDPDNDDDPGSSTAPNIDSDDGSKGHVASSIHAIYRPVAWSRHIGSSLPDLSAKQRSVLADVSGETDSDPELSMAFEDDVDADDFEATTPRPDDIRKPEASPLVMAAELSTSLKRRAASRTGSMATVKVSRRARLAEKLREIFDIDVLHEVWAEMPCWLLRSVLLQGYMYLTNSHICFFAHMPSREDQILKSGSLSKKATRTKRWIKYWFVLKNDALSWYQSSSDPYFLNGIVDLRYVMACEPVGEKEIRLRTNQKNVLLSADSVPSRDEWVKAIRKVMFKAQNMGDTVKIAIPYSVILDVEKSTAMDFSETIEVKVMDKVDSPDSYFFAYFHDIQAALDHIRDAVRTHRALAPTSPQAVLDTTVKPSTGVAPGIDRARSLPTSDAKGAIPSRLSLLFRPFQDSLPLPIARMSSSPEPPNGAEEYTHISKRGTFVPITASPQSYSANELASPTTYNSTPAIPSSTPALVRDHTYPPTTPSIESNTSSPIRILPSGVPWNMSVPSWLRSARKAAGSSVSTTGIGPTPTSSQSLGSVREVYSAPRRSSSDQPLGTAAELGYSVLETAEAVVDPETTEKFRAAFAFDDREVLLGHFSGYLFRVLPLYGRLYVSSNYFCFKSSGPLTPKTKARSMCTMILPIRDILNVEKSRATRFGHYGLTVVIKGHEELFFEFGVEDRRTAFVSILERQMEDLRKRPSGGEIPKLSQGQRDALILEEFEPRNSASSDTDPAPPSEALSESLPAVMFTSASSTFLTFKPKESLHFTFLTVGTRGDVQPYIALAKGLIADGHRCRIATHGEFQAWIESHGIEFGYVGGDPAELMRICVENGTFTVSFLKEGLLKFRGWLDDLLKTSWEACQGTDVLVESPSAMGGYHIAEALRIPYFRAFTMTWTRTRAYPHAFAVPDHKMGGGYNYMSYVMFDQVFWRAISGQINRWRRNLLHLENTSLDRMEPHKIPFLYNFSPTIVPQPLDWPEWIHRAGYWFLDDAEVGAKKWTPPQDLISFIDDAHQAGKKVVYIGFGSIVVSDPRGMTRCIIEAIVESGVYAILSKGWSDRLHTKTSEACEPEEPLPKQIYAISSIPHDWLFRRIDAACHHGGAGTTGASLRAGIPTIIKPFFGDQFFWADRVEALGIGASVRKLTVENLKDALVVATTDQKQIDRAKLVGEQIRSENGVATAIEAIYRDLDYARSLIKRPTNAVEEAEESPTPEGAGSRSRYDSGGSQRGSEDWSMVSDPDESRSSFGSRRSDPTSLKRHSLAAAVMSVLPGALASSDHRRSNSTSSRHP

SEQ ID NO: 7879 - protein, 293 aa, Elsinoe australis
MRYGHRVRIATHNVFADFVQDSGLEFYPIGGNPAELMAYMVRNPGIIPQMDTLRSGEIKKKRLMIEQMSEGCWSSCIEPNPSTGNPFVADAIIANPPSFACVHCAQALGIPVHLMFTMPWSNTRHFPHPLANLKNAADERSRKNYASLSDVVNRWRKTLHLEDTPTFNGPALAEKWNIPFTYCWSPALVPKPTDWPSHITSNKLDVCGFFFRESPKHDPPEQICRFLEKGPPPVYIGFGSIVLDNPQRITAAILEAVNTLGIRAIISRGWSDLGGNEDTGGDRNVLFIGDYKV

SEQ ID NO: 7880 - protein, 912 aa, Byssochlamys spectabilis
MTSDTGDDQKWLQKQSINDNRNVMTIARSLHEVFSKFTIALESAGQPHEYTIKNDKPNLADIWLIEWTGYRIKFVNHNTPYDLPDPILLETHAIIARILHATGMAEQIDRLQYKKSDSHALAGDGTDGRIDLDLDSPACRAIGALVRPSSEVQGDTEAPPSYSEAVQAAVKLNIVIQIVGSRGDVQPFIALGQELRRYGHRVRLATHGVFESWIKQTGLEFFSIGGNPKELMAYMVKNPGLIPQMKNINVKDIQKKRQMIAEMLDGCWMSCIEDDPTTKVPFVADAIIANPPSFAHIHCAQALGIPVHLMFTMPWTNTREVPHPLANVKSSKTTPTVANYLSYSIVEWLTWQGLSDIVDDFRARLDLEPVPTNEGPSLLDTLKIPFTYCWSPALMRKPQDWPHHIDVCGFFFREVPDFQPPPDLVDFIQRGPKPIYIGFGSIVVKDPQKFTATVLQAIRQAGVRAVVSRGWNSLDGDSSADIFYLDECPHEWLFQHVAAVVHHGGAGTTACGLRYGRPTAIVPFFGDQPFWGRLVATAGAGPAPIPYRSLNSHNLSEAIRLCLRPEITRAAEAISDKMGQESGVQAAVHSFYRHLPWENMRCNLLPDRPACWVYKKSKTKRTMLLSKAAAQILLSHSRISAKDLRPYETKRIEIKLRRYDPLSSTTSAFVETGTKMVKATGDIFLKPYQEYERGRKETKAPSIASTSDSAFVPESDCTDTSSTSRGSDRRRESLKTGMLMVSGSAKSAGRVIGSFSKGAIVDIPLATTEGLRAVPRLYGEEVEDYGTVTDWKSGGIVAGKTFVGGMKDRLADLFVQPYKGGKEEGALGVAKGVMKGTLGVASKCSSAALGLVAYSGQGILKSVHDLGRTKTKRMIAAARVKEGEYLEDLASEIGITPSAVIRAFEAHERGED

SEQ ID NO: 7881 - protein, 471 aa, Lysobacter capsici
MSAPTLALPAAGPAANDHSVDGPVQPGAIVIFTVGTQGDARPCIGLGQALHRAGYPVRIVTSDNFAPLVREAGLEFCAISADFSDLLTNNPETVDKALNPWFLVKHTRAKFAEWAATWAKEARPACQGAALLIGTGIVTQLAKALGEAENVPFLQAHLQPFTPSRKLSPLSFWSKREFPGWANMALFSVMKLLAWYTLKPAVNGAIRPQLKLPLYPWYGPYFDKDPGRMRVLYGYSRHILPRPDDWPEQVRVTGSWFLDQAGEWQPPQSLTDFLAEGEKPIYIGFGSMLANNAEAFTDIVVDAVRLSGRRAVLATGWGGLRREPGRMDDQIYVIEAAPHDWLFPRMAMAMHHGGAGTTVAAARAGIPSVFVPFFGDQPFWARRMNELGVAPPALDRRTVDAAQMAQAIAQALEPQRIDAAHVLGEKIRAENGNATAVRTLGEWGLLPPLRGGHEAATPATAPTSEPLVQVA

SEQ ID NO: 7882 - protein, 1436 aa, Pseudogymnoascus sp.
MIRSHEDIKKRVGRKLTKKRREDRRVTMEIPKRFEDGDDADEDCTAPKGQNGLINQSVFGMIAAAGSQADFHARFDGQDSDDEEDETTESEDAGRPSEAASDPATSKASADEHKSRHRTHRHKLSDSKILRSFSQLGIKNKSKHAQLSSSSSDPVTPEKIKDTERYHAARSPFKGPPIMSQMLEAKAAAVQRASFDSRRSDYISGQTDGADGGEGAPSDLAIRLMEIFEFESPEMVIDEYPCWLMKSVLLQGYMYLTEKHICFYAYLPKKSNEIVKSGYLSKRGLKNPKYNRYWFCLQGDVLSYYTDPSDKYFPSGNIDLRYGISASVVDKDKTLFEVITNHRRYQFHADSIPSAKEWVKALQKIIFRSHNDGDSVKISLPIENVIDVEDSPVIEFAETCKIRVIDNDETYAIDEYFFSFFSFGKQALSVLRTLVSDSAAKQIPEELLVQPQGNSSGNSPKGGSSRPSLTLSTKGSKSNLNPAKATGSGLEDSVKATLAPLMSSPLHVHSPRASGEFSRSSFDVNHRSNSQTRNSRRSMDGSRFKLDGQGRDGSPSNARRSFSRNRPSEKKNSEKQDSSDSYVHSMEESSGAAQSASEDVEGSASQILRGSEGFFQPTIHRSGSASRRRDDSQLPGGPLLPETPTTVPHAVTIDAYERPKLAHAEGGSSPSLQTLAKAGAYPLQRAAGFANYLNRHSKRMSTLLATESMGYVEKVSGMWKGGKKHYDEPLGQGLEDDTDDELSGHSDGAEGRFQAHFALPAGEKLHAAYFGYFHRVLPLYGKIYISNRSFCFRSLLPGSRTKLILPLKDIENVDKEKGFRFGYSGLVVVVKGHEELFFEFGQPDARDDCCVTLLQNLETIRYLKESGLLTQEEEESAAWAVAEHKALQEARQESRQHGHDLELPNTAEGASTDSAPIMFDDPRASILNFKPTESLRITCLTIGSRGDVQPYIALCKGFIAEGHKPKIATHVEFKDWIEGHGIEFAPVGGDPAELMRICVENGMFTYSFLKEASTNFRGWIDDLLSSSWLACQNSDVLIESPSAMAGIHIAEALGIPYFRAFTMPWTRTRAYPHAFAVPEHKMGGAYNYITYVMFENVFWKAIAGQINRWRKKELSLPRTSLEKMQPNKVPFLYNFSPSVVVPPLDYSDWIRVTGYWFLDEGTGYTPPKEISDFIAKARADGKKLVYIGFGSIVVSDSAALTKTVVNSVLKADVRCILSKGWSDRLDKIGATEPEVLPEEILQIKSAPHDWLFTQVDAVAHHGGSGTTGASLRAGKPTIIKPFFGDQFFYGSRVEDLGVGIYLRKLNVSVFARALWEATHSERIIAKATLLGEQIRSENGVDTAIQCIYRDMEYANSLIKRKSAVTHEGLGEEIEESWTFIGDDNDPELMSRIHAWDPRVVLAHSRDLTEPQLKDVAESPVPTSRSETPLPSEQEAG

SEQ ID NO: 7883 - protein, 802 aa, Fusarium fujikuroi
MSPTPDDNQSHRQTRYFELPANGEHSAQLPDELPPYQALAELEATTTGREDGRIDIDLSSRIARRLSKLVPTGKPPISYGQNQPPAYTETSEKSIRLNIVIQVVGSRGDVQPFVALGTELQRHGHRVRLATHGQFDKFVRESGLEFFSIGGDPAELMAYMVKNPGLFPSMKTLRGGEIQRKRKMVDEMLHKCWSSCIEPDELTGRPFVADAIIANPPSFAHIHCAQALGIPLHLMFTMPWTSTREFCHPLANLKANGSDMSATAANYVSYSLVEWMTWQGLGDIINAWRDTIDLEAIPFSEGPCLTETLGVPVTYCWSPALVPKPADWPENIDVCGFFFRDAPKYQPEPALQQFLASGPPPIYIGFGSIVIDDPDKLTATILDAVRATGTRAIVSRGWSKLGGDSPGDDQVFFLGDCPHEWLFQHVTAVIHHGGAGTTACGLLNAKPTTIVPFFGDQPFWGNMVHAGGAGPAPIPFKALNSSNLAEAILFCLTPEASAAARQIADKMSSAELLVEDEKVSWNNLKAYQPQPVHIENRRWDPVTATLATLATTSVGMVTSASDIVVKPIQALRPVTPSGSRSASRDRSRNNSKRPSEEDVFGRPAGIDLSSAPTATKDKDPNHGALAAVKGSASGVGGFFKHYSKGMLLDLPYAVTEGMRNAPKLYGGKAYDPGAVTDWKSGGIAAGKNFAHGMVEGIGGIVMEPVRGAKKEGAAGAAKGVGIGLLNLGTKVGSGALGLFALPSQGAYMSARALVKRKTGKSIMEARKIEGRDAVERSGEEIRQKDRTTVMEGFETLTREMKK

SEQ ID NO: 7884 - protein, 419 aa, Unknown
  Description of Unknown: Rhodobacterales bacterium HTCC2654 sequence
MRILILTYGSRGDVQPFVALGRALVARGHEVTLGTARRFETFVREAGLGFAPMSDAMLNLLDTEAGRDMMESTQGVLQSLKWTVMLTRTVGPAQAELIGDSWAAAEAVDPDLIVFHPKTYAGPHIAEKRGIPAVLAMLVPMMVPTGERPNVGFPDTGWQWWNRFSYRFVNRTMAFSAGRHVREMRAERGLPKQRRFDLLRDSRGRMLPVLNAVSPSVLPAPRDWPDEAVMTGYWFTDHGDWTPPDELAAFLEAGPPPVYVGFGSMAGRSPGRLAKAVIEALTRTGMRGIIATGWGGLKPADLPDTIHKIEGAPHDWLFPRMAAIVHHGGAGTTAAAIRAGKPQVVVPFFGDQPFWGKIMAQHGVAPDPIAQKSLTADNLAEALRRVTGDPAMAQAAEALGAAVRQEDGLKRAVEVIEAA

SEQ ID NO: 7885 - protein, 1240 aa, Zygosaccharomyces rouxii
MDIKGKVPFLRKVEGSFRKKDSSNKKGEKPSHSNKASSSISSAETSPSKRADDSVTTPEGQVGNQDDSGDAGGLDTAKARYTPKSIVELLTTASVVAGMGEQQQAKDVADELDGGDIDSDEFVDAKSEVSVEPASGGKVEDVDVSRVDDGKYSNEQAGFDGTTTARSLGFDLSVEPVEKTRDYINSLDLTRRRTMIQKLVDHFKLSEDEKFVGDFPAFLLKDVLIQGQIYLTSMHLLFFAYLPTNSDEVQLSGNLNVHSRIRGSTRYWAVLRNQSLSLYSSPTETYFPELEIDLKTTASITAIQSKTTGKPTNSFKIETKKRNFTFSADSEFAAKSWTNSLRKQHFAAQNANQNSVSLKIPLVNTMEVIDEPVLEYASTVRVKAVESSVSGVHVEFVFVFLDNSSTTLKRHIDAQLELLEQSGIPALGRVFSSGQNVVSDSTDASIRGKNPNDSNEGADVSSPKRASHLHHILPHFPRRQGSSSSEEKSSGLSSLKPKFGSNSRGNGDTDASSSSSHLLIPVKSVVQKPKSFVQDFNTKAHVTTGNGSWSSSSDVDENATESKKGHQHRYFRHGLWNNKPIHYRNTSVPFGDEDPYLASPDENKAANEKFREHFHLDSNANLIGAYFAHLSRNIPVYGKVYLSEDMMGFRSLLPGTHTKMNLPLVDVEACYKEQAFSFGYEDLILVVRGNNELCFAFSSTEARDDAESIIRKRMEVLKLRRREIMNPTTNILEVDPHFAKMKLVEDKINAGGIDAPLVVDKNPYYATTIKPHGKKLKIGLLTIGSRGDVQPYIAFGKGLQKEGHDVVIITHGEFREFVESRGIAFDEVAGNPAELMSLMVEHESLNVGLLKNAATNFRSWIAELLQTAWKACVRSEIDVLVESPSAMAGIHIAEALQIPYLRAFTMPWTRTRAYPHAFIVPDQPKGGNYNYMTHVLWENIFWKGISGQVNKWRVETLDLPKTNLELMQQSKVPFLYNVSPSIFPPAVDFCEWVKVTGYWFLDEGQSYTPPPDLETFIAKARKLNKKLVYIGFGSIVVSDAKEMTKAITEAVLEADVYCILNKGWSDRLSSKSDKKEIEEPLPESIYNSGSIPHDWLFPQMDAAVHHGGSGTTGASLKAGCPTIVKPFFGDQYFYATRVQDIGAGIALKKLTGKSLARALKEATHNEKMKMKAQEIKEKISLEDGVKTAINCLYTELEYAKSLVVVKAEQRNSPRSRLLELPSFAAPKLPDLNLEKTFAFL

SEQ ID NO: 7886 - protein, 1295 aa, Dichomitus squalens
MHAGTQTFIQALQAVPWAEDQDNDDEEMNHDATPVGTESDDEDRSVNRLTSSIHAIYRPLARSRKGEAPSSHRAARSPDLPSVSDNEEASRPDDVSPSDDDTEGDFESHEGGLITGPGHSGRMSPETIPDLDSSVLEAHGSTRGTGRSGSMATVRQNRRAQLAGKLRDVFELSNINEVVAEMPCWLLRSVLLQGYMYLTDAYICFFAHLPSREDQVLKSGFLFKKAQRTKRWIRHWFVLKNDVLSWYQSASDPYFPHGVVDLRYAISCEPVNQKDIRLRTNQKSIRLSADSVPSRDEWVKAIRKVMLKAQNNGDTKIAIPYPTVVDVDVSGAMDFSETIEIKVQDKTTDLALDSYFFAYFQDLPTALEQIRDAVRTYRGIPSIDCSPTVVDSTSARSPSAQSPTKPSAGPHTKHPAGFRLTSLLWPLQETHGRSGSTHGANNAHNEDFTHIVKKSSSSFVPIATTNETTSPTEGGPGSLRNSTATLTPTSTLTASDHTYPPSTSASVVDFRGNGAAGSTKEPTASSSGSGWSVGIPSIPSIPAWLRAPSRSLFGVPSTSNLARPVIEHAATVHLPPSAHALRTVSEVVSSRASSAGKLPSASMSGDFGFFSILETPETAVDSEMVDKFRDAFAFDDKENLLGMFTGYLFRLLPVYGRLYVSDNYFCFKSSGPLTSKTKMILPLRDVLATEKSKSFRFGHHGLVVIVKGHEELFFEFVDEERRNALISVLQKQIEVVRQRTSSGDPRAPSDGHHEALILEEYGARNALDMDESRSTSSESAPAYMFTSQSSTFLSFKPEKSLHFTFLTIGSRGDVQPYIALAKGLKADGHRVRIATHGEFKEWIESHGIEFGYVGGDPAELMRICVENGTFTVAFLKEGVQKASSFRGWIDDLLKTSWEACQGTDVLIESPSAMAGYHIAEALKIPYFRAFTMTWSRTRAYPHAFAVPEHKMGGNYNYMTYVLFDQVFWRGTAGQINRWRKHTLGLPGTSLDKMEPHRIPFLYNFSPTIVPPPLDWPEWIRITGYWFLDAADVGSKKWEPPQDLLDFIDAARKANKKIVYIGFGSIVVPDPKAMTRCVIDAIVQSGVHAILSKGWSDRLVKNVPAQTEPEEPLPKQIYPISSIPHDWLFKQIDAACHHGGAGTTGASLRAGIPTIIKPFFGDQFFWGDRVEALGIGAAVRKLTVESLSQALREATTNQKVIDRAKLVGEQIRAENGVATAIEAIYRDMEYARTLIKGVAQRHIEEHLNAEHATIRDYSGSSTPPERASPSMSASGAVSDWSVISDSDDGPHEPQSP

SEQ ID NO: 7887 - protein, 416 aa, Rhodopseudomonas palustris
MARIAIQTLGTRGDVQPFVALGLGLQKAGLQVSFATAPQFESLVTEHGLQFHPLPGDLVDLIQTPLGKAAISGRHKLIATLRLMARVRPMFRPLLDAQWAAAQGADAIVYHPKAIGGVHIAEKLGIAAFVALPLPALSPTRAFPSPLLPFADLGPLNRASHALTIRYGDLAFRKAVRTWRREVLGLPAASDWLSLRGRPVTKLYPYSPAVVPVPADWDATSQVTGYWFLDEAEDWTPPAPLAAFLQAGPPPVYVGFGSLPCDDAERVTTLVVDALTRAGQRGVLATGWGGLAIRPMPAHIHMLQEAPHHWLFPRMAAVVHHGGAGTTAAGLRAGRASVICPMFGDQPFWGRAVHALGAGPAPIPHRQLTPERLAAAISSAVHDPAMRRRAMEIGRTISQEDGVAKAVDLIARDSRC

SEQ ID NO: 7888 - protein, 1481 aa, Venturia nashicola
MAPPDAAKLRENLGRRLANRKGPRKVSMDIPERLKEEEDEQDDATATHMNQSIFAMVSAASRASQTDFQSRFDEASSESESENSEQLSRTTPAIGSLPPAPITQEPKPKHKRDSSVGRLFKSMHKGFTPRKSRSSSKDMMSSSQILAPRPPPHIEVDEEESQQDAAQSSGAPMMSRILMGEAEMAMSQHLQPVSEQEDGESASVPKLGSGDLEQRLMDIFNHEEREAIIGEYPCCLLSSVLVQGHLYLTQKHVCFYAYLPKKAAKIALSGHLAKRGLHNPRYNRYYCELKGDVFAYYDNPSTRYFPSGQIDLRAGVSANIADREKNKDGAYFTLVTDKREYMFKADTTTSAREWVKALQKVIFRAHNDGDSVKVSLPIDHIMDIEEVKILDVAQTIKIRVYDNDETYSIDEYFFSFFMLGEEAMRVLKILVEDNALHKCPESDMPTDSDVNEFAAPDSVRPSLNVERTSMASQRTPPLRDTVRATLLPYASVPGQRALSNSRLSTESRRSSMEIRRRSYDSRNSSDGRQSISLSRQFDRSPLSPTSPAPQESLGSPRTTSMDRDTESSAAIQSLDETDASASQILNRSDVFQAPTLHPPQRSGSVDQGQRVSSDTARSTRVSQVPHTSSEQGRNKLQKQRPGPTPINTVQPTLSEQDMTAGSSYSFQNLVRAGTSPLQSAGALGNFLRTRSKRMSNLLASESMGYYEKVSGMWAGGGQHYGQTDGMPDDDDIPGGNENKEERDAMHAQRFREHFALPDSEELKATWYCFLHRVLPLYGKIYLGSTFVCFRPLLPGVRLKLKLPLSDIENVTKEMGYRLGYSGMVVAIRGHEEIFFDFREQSHRDDCNITILKKAEAIKKRRLKESGFLNEEELIAAETARAEHKALQEARKSGQLMGDHEVELPHHLSYIGTDPVLSLLDIADMLSEASETRGIFVDDPRADLAKSPKPMQITCLTIGSRGDVQPYIALAKRLMKDGHKVRIATHDEFKDWVEGHGVDFAPVAGDPAKLMRICVEHGMFTFSFMREATGHFREWLEGLMATAWEGCQGSDLIIESPSAMVGIHIAEALEVPYYRAFTMPWTKTRAYPHAFAVPEIKRGGNYNYLTYVMIENVFWKATANQMNKWRRRSLGLGNTSLGRMQPNKIPFLYNFSPFVVPPPLDFSDWIRITGYWFLDEEDWTPPPQFAKLKAFIKKARDDSKRLVYIGFGSVVVDNPKAMTEAIVEGVEQAGVRCILSKGWSDRLSKEPTDGTIPEVPLPASIMQITYSVPHAWLFAQVDAAVHHGGAGTTGASLRAGIPTIIKPFFGDQFFFGARVEDLGVGICMRKLQGPMLAKTLREATHDQRMIDKASLLGEQIRGEDGVGQAVRAIYRDLDYAKSLIKRKTKDSKTGCVELEEDIEETWTFVGEESDTEERKQTEGGNFTGGDGVMESSLEEMIQESSVLSEERDETVPFEGFDEGDAAAAATSSPIPISAKVKGKMKA

SEQ ID NO: 7889 - protein, 1453 aa, Phialophora attae
MSTQESLPRKSGSRKLQKRRPQMNRLPSSKMPDRLRLGDDAQDDVTAPTRGTQVPGQYMNQSIFSMIAAAGSRTDFNTRFDDSSDSDEDALPEGNEPEEEVPAPKQSSDVAWREEKSTVANSNDKQQKKKKRLSDHRLMQSLPKLSLSINKQRKQSSHRSPPSSDDATSKSDRSNPRDAPVMTRLLTAEAELEEAELDKDKGLGQSRSRGESSPATLLASRLMQIFGFESPEKVVAEYPCWLLQSVLLQGYLYITRQHICFYAYLPKKSNTVAKNGYLAKRGKTNPRYNRYYMILKGDVLSYYSDPSAQYFPQGTIDLRYGISATLSAEKDKQKECKDFSVTTDHRTYNFRADTPESAKEWVKSLQRTIFRSHNDGDSVKISLPIENIIDIEESPVVEFAETVKIRVIENDESYAIDEYFFSFFEHGSDVLNVLSGLGAGSATPGVQDLASPLSDERRARSPGARRSLDMLSHTPRDRSTTPLRDSVRATLKPYALGDDGKMSPRMSGEFSRPSKSPGRQSFDQVTGDYSRASFDRGRRSPSTSGLDVARERRSGKSPLARTQESPESHARSFDKETDSSVPPLSPKAEAHMSASQILTRSDVFHPAKVNRMDTVASMSTEPTGQSSEIETTQSTSSPQQEATPPIPIRTRPSIRQRVLSQDSDFFEAQEQAGKQTGSPTLQDLYKAGSYPLQRAGAFAGYLKNKSNKMTKLLATESMSYFEKVSGMWAGNRKHYGANEDVLSDDRDVDPEDAESNVPHGDRFRMHFALPKTEKLQATYFVWMHRVLPLYGKVYISNRKFCFRSMVPGTRTKLILPLKDVENVDKEKGFRMGYHGLVLVIRGYEELFFEYMSAEDRDDCAITLLQSLEAGKYLDDDSTILPTDEDSAALAKDEHRLLQEARTSTSKRDANVVVPETNETVYSHDQPILFDDPKVSIINFRPPTALRITCLTIGSRGDVQPYIALCKGLLADGHKVRIATHREFQPWIESHGIDFRPVEGDPAELMRICIENGMFTYSFLREASTKFRGWIDELLQSAWEACQESDMLIESPSAMAGIHIAESLRIPYYRAFTMPWTRTRAYPHAFAVPDHKIGGAYNYYSYVMFDNVFWKAIASQVNRWRKKELGLRSTSLDKMQPNKVPFLYNFSPSVVPPPLDYSDWVQVTGYWFLDEATEWTPPADLVAFIEKARADGKKLVYIGFGSIVVSDPAGLTKTVVESVLKADVRCVLAKGWSDRLGDPSALKAEVPLPPEIHQIKAAPHDWLFKQMDAALHHGGAGTTGASLRAGIPTICKPFFGDQFFFGSRVEDLGVGICLKKVNVSLLSRALWEAVNSERMIVKARALGEKIHKENGVQTAIRAIYRDLDYAKSLIKARAELQGQPMPLGDDEEGEIEETWTFIGDESDPELMKKMQDWDISKGGRSGGPRVSMDGLRRCRLLSREGWRRVVCFGSDDPW

SEQ ID NO: 7890 - protein, 1252 aa, Phaeomoniella chlamydospora
MPDDEKNFKQRLTHRFSRHSRPLNRLPSGRLPERLRYGEDANDDVTAPARGAGVPQQYMNQSIFSMIAAAGSKTDFHQRFDESSDSEEEDEQPKDDRPTNRQSLERNTSARAARRPGDPSVAAERYDGKTETAKPGEKKRYSLPKLHPKHGKTRDSRSVYIDSPAREHLSQSKLSRTMTPRDAPMMSRMLEAQAQLSTSGFGSGIIRPPTDEVAARKRSESSPETLLSTRLMEIFGFENPEEVVSEYPCWLLQSVLLQGYLYITEKHLCFYAYLPKKSNVVAKSGYLSKRGRQHLRYHRYWFTLKGDVMSYYNDPSDLYFPSGNIDLRYGISAKPADNKDKTKESKDFSVTTDHRTYHFRADSAASAKEWVKNLQKVIFRSHNEGDSVKISLPIENIIDLEESPVIDFADTFKVRVVEGEESYAIDEFRSRCVQNIAGVDRQERPKVAARLGFVFCSNWQFRPTEASPVGSDRLVPDEDQRPGSSQALQDIIKAGSYPLQRAAGFAEYLKNRSKKMSTLLASESMGYYEKVSGMWAGGHKHYGENEGIMPDDNAVDPEDEEESVGHGDRFRTHFALPPSEKLQATYFGFLHRVLPLYGKIYISNRKFCFRSLLPGTKTKLILPLKDIENVDKEKGFRLGYHGLVLVIRGHEELFFEFNTTDHRDDCAITLLQNLESVKYLSESGLLAEEERAEAEQAKLEHKMLQEARQAGHASHDLKLPQKASDTDSTPSDTAPVLFDDPRASIINFRPTESLRVTCLTIGSRGDVQPYIALCKGLIADGHRARIATHAEFGPWVRKHGIEFKPVEGDPAELMRICVENGMFTYSFLKEASAKFRTWIDDLLSSAWEACKDSDLLIESPSAMAGIHIAEALGIPYFRAFTMPWTRTRAYPHAFAVPEKKIGGAYNYFSYVMFDNVFWKAIAGQVNRWRKRELGLGSTNLDRMQPNKVPFLYNFSPQVVVPPLDYSDWVRVTGYWFLDEGSDYRPPQELMDFINNTRKDGKKLVYIGFGSIVVSDPAALTKTVVDSVLKADVRCILSKGWSDRLGDPAAVKTEVPLPPEIHQIKSAPHDWLFRQIDAAAHHGGAGTTGASLRAGVPTIIKPFFGDQFFFGSRVEDLGVGICMKKVNVSVFSRALWEACHSERMIAKARVLGEEIRKENGVQTAIQAIYRDLEYAKTLVKRRQMVTKSDSPEKPQFDDELQAIEESWTFIGDEADPELAKRIRDFDMKSYAEARSSTISRQRSERKSGRGDHE

SEQ ID NO: 7891 - protein, 1530 aa, Dictyostelium purpureum
MDDFDSKSLNTSQLLRQISYSDNLSSVGSEKRSNHHRLINSQEGEGENHINNSIINDLDNTNSVASIYGSGGSVPNQPHHHLTLSLQQQQEFQQIQQQRQQYSLDSEYTPPNIYILDPDFLERIQNNQKNNIDQLNKTTKTIVELSSGVTKNETTYIETPEENETENRIMRQELLSELSTLDSFTKITKPGELFGFCECTLLYNHLTITNLIITSNYLVFLPQQQVSKDYVLENYLQKKGDFFWRKYWFVLTTDSISWYKNSILKETHYPNGTILLSKIVTVDKLSPDETGKPLCLQIITNTQIHLIQFDTEPQLDHWYDEINRMQKNLKISISFNDIVSIAMESNAALFSDSICLTLKKGENCLVTPVSSSNEFYSLLVKIWNRNRGVHITDSEKQRKMLEFQKTFKLSQGVNIITETPCTFYQDEEFSYDGILYATNDSLYFSSEDSVLIIPDTDILAITIDRKDNRESFKIYTTDYEILHFDNIDNIENFYSAITEPLKNKNSKIFFSSIGQAPPIASINKQKTSGIRSWKIPFGIANIPIPNFSIPIPIPKNIPFMKSKSTNNIDPISNNNQQQQQQTSQLTQSQAIEDNNNNNNNNNNNNIDNKHEKTILIQKNSNINSKFHDIFPLLPLDETVIMHQHCTLYYYSYDSNVEGTVYITKSYIAFNPSPLSKQNLNHSPSSTYDSDSDSDSDSDSDISDDFNTDDNNNNVELDKKLKEREILMRKALIPFEDIVSITKEKFALLFNQCVKIHTNDHKWIFGSLNNLNSFYNLVLDTWKQIPLTENEGIFTPLENVKIKNKLGLPAEENLITWFNCTNFKGAQLKYGFLYISNHHICFRSKFGFQKRTIIIPFSQVIEIKKYSVLIPNGIKITTSAQQDFQFASFIHRNKVYQILHDTWLKSKKSNSNLSSPVLDYQLISPPIQPEQQQQSSQTPKPQPIQLNNEQPSVLNDEKQLPTTLPKINLSLPTSSTPNTPSSSFLSPRSQVSSSSISLTSPTLNSATPNIQSPTLPIRPLKITILTIGSRGDVQPYIALALGLRDYGHYVTLASHELYRDWISKDHGLNYKHLGGDPKELMDLCVRNGIFTPRFIKEALHRFRSFIDDLLLTCWEAAQGSEVLIATPGCFAGPHIAEALQIPFFNSFTMPFTRTRVYPNPFAPFAAHQMGGVFNIATHVMMEKILWQPISGQINQWRTETLKIPAWNSSVSINETIRMPYLYCFSKYLVPKPPDWSGEIDITGYWVLKNSSHDEQAPQDLLDFLKNEEDPPIYIGFGSIVIENPNALSQLLVEAIKLSGKRAIISQGWGGLSLEETPNSIEGSSSSMIYLLKKPIDHSWLFKKVSLVIHHGGAGTTAAGLYASKPTIIIPFFGDQFFWGERIKETGIGTAISFDQLNAKQLSSTIISVLNDSSIVGRVSKISKLLEKEDGIQEAINFIHRHLPFSFIPPRELPFSSAPNACMDCKQPFSLLHVMKIRTHCHNCGKIFCENCANHKIPIKKFRINTPVRVCTACYNQIQSTQNINPFIVNND

SEQ ID NO: 7892 - protein, 1402 aa, Scedosporium apiospermum
MAPFDASSDLEEESKAKHVHVPKKLHKRRPKESITSDDPNMPERLRCLDDAGEEDLTVASQGPTMYMDMNQSIFGLIAAAGSRLDFTDRFHPQSSDDEGDNEGKNDLPPPGSRTTIFRRHAKSPKSSEKSRLKITDHKLLRSLPALPRLSKSKLKKDHSKFPTSPTDTTPSDASDSVSRGSDLESDKRYAPVMSRMLEARAEMAARPSFDLERLSGEGSRDSDSTDLGISPLARKLKEIFEFDEPEEVIEEYPCWLLQCVLLQGFMYITAKHVCFYAYLPKKANEVSKSGYLSKSGKRNPKYNRYWFRLKGDVLSYYADTTNVYFPNGQIDLRYAISANITDKEKEGTHFSVTTHHRTYHLKADSAPSAKEWVKAIQRVIFRSHNDGDSVKISLPIENIIDIEEMHMLEFADTCKIRVLDNDETFVLDEYYFSFFNHGKDAINVLKILVDDAASRQKDMPKISVLAHRPNSPLDPAEVVQATLPRDIVKATLSPHSPPVSPRASADMSRTSFDGFKPFGRSSIDCARNSQDIPRRHFSGTRRSLSRSRDGVDARGGSPWKHGASSESYVHSVDEPSVSALVLSSSDDPSASQILKGSDVFQSPTIRRSTSSTRLKDRHDKLPSGLQPQSPPLKSIAPKHAASTGNLPNPIPHDPNGQSTPPTPTLQQIAKMGSYPLQRAGAFANYLNSTSRKMSSLLASESMGYVEKVSGMWKGGRKHYEQPHALRTDDDEDDDDDSDGNKRATANERFRAHFALPETEKLQSTYFGHLFRVLPLYGKIYISDQNLCFRSLLIGTRTKLILPLKDIENVNKEKGFTFGYSGLVLVIRGHEELFFEFNRSEIRDDCTVTLLRALEKTRFMKDSAQLPIAEDPSAEAARAERDALQEERHEVENSNAINALEAATDGPPILFGDMKTSLLDFKPANPLNITCLTIGSRGDVQPYIALCKGLLAEGHKPRIATHAEFQGWIESHGIEFAKVEGDPGELMRLCIENGTFTWSFLREANSMFRGWLDELLASAWVACQGSDLLIESPSAMAGIHIAEALGIPYFRAFTMPWTRTRAYPHAFVMPESKMGGAYNVTSYVLFDNVFWKTTAYQINRWRRNMLKLPNTSLEKMQPNKVPFMYNFSPSVVAPPIDFSDWIRVTGYWFLDEGQDWTPPQDLANFIAKAREDGKKIVYVGFGSIIVKNPAKMTQEVIDAVLAADVRCILSKGWSDRIVKGGPPPIADEPELPPEIFVIKSAPHDWLFRQIDAAAHHGGSGTTGASLRAGIPTIIRPFFGDQFFFGSRVEDLGVGIWLRKWGANSFGRALWEATHNERMIVRARSLGQRIRKENGVEMAIQCIYRDLEYAKSLIKRKPKEGEQPKDLDDDDEGEEESWTFVGRDEPDPEVLTRRLSDLWPGPEN

SEQ ID NO: 7893 - protein, 1448 aa, Steccherinum ochraceum
MSDDAAGHPITQVPEGPPEYPSNPSLDRSAELSTSPDARTGIMKRAMGKTADRLSRSRSAGKQTPSMTQSSPALPVSGHRRIFSLNRSKGKEKASTDDDLTTAQSQLVASPTSPSLPRRLSGRSTVAAQDDDSPFITPRSPPFGPTRSVFNIFRGDGSLRAGTQTLIQALQAIPWAGDDQDNDEDAANQETTDPESDDEDKPASWLASSIHTIYRPVARSRRKDRAARSRTEPQRMPSLSDAEDEPTPEEPVLSDEDIEEDFEPQSFDLHQSSEGQSTSMTLPPLPELDPPERSSIKPVPARSGSMATVKIQRRARLAEKLRDIFELKGISETKKCLVGFYGRFGYMYLTDSYLCFFAHLPSREDQVLKSGSLSKRAQRTKRWIKHWFTLKNDVLSWYQSSSDPYFPKGVVDLRYAISCDSVGEKDIRLRTNQKTIRLSADSVPSRDEWVKAIRKVMFKAQNMGDSVKIAIPYSAIVDIERSSAMDFSETIEVKVVDKGESYSVDSYFFAYFHDLQAALEQIRDAVRSSRGVPGDVTPPSVIDTTVSRSPPVTPNQTDKVAWASSPDSIPRASGFRFTSLLKPLQDSLPMSRTASAPEPIESPEEFTHVTKRSSTTFVPITTSPKSSFRLDSPPAARPSLITESSSSSVTPTASYISTHTYPPSSSLSPSISETGHSASSNTSTWSVGVPSWLKMPSTRRLLTSPFSSLSSRPSTDHAATLPASGSAKVTEVLSQSYLSPSSTSRPFSGEFGFYSILEAPGFPMDSDIVEKFRSSFAFDEKETLLGYFPGYIFRLLPVYGRLYISTNYFAFKSSGPLTSRTRMILPLRDILSTESSKAFRFGHYGLVVIVRGHEELFFEFADEERRTAFVSLLEKQSEDALGRAAAGEAHHTRTEGQRDALILEEFGPRAQITESEVMPEPENLDGSLPAVMFTSTSSTFLTFKPKEPLHLTFLTIGSRGDVQPYIALAKGLIADGHKCRIATHGEFKEWIEAHGIEFGYVGGDPAELMRICVENGMFTVSFLKESMAKQFRGWIDDLLKTSWEACQGTDVLVESPSAMGGYHIAEALRIPYFRAFTMTWSRTRAYPHAFAVPEHKMGGNYNYMSYVLFDQVFWRGTAGQINRWRRNTLGLPSTSLDKMEPHKIPFLYNFSPVVVPPPLDWPEWIRVCGYWFLDDANVGAAKWSPPPDLLEFIETAHKAKRKVVYIGFGSIVVSDPKAMTRTVVEAIVQSGVYAILSKGWSDRLVKTATTEVAEVAEPLPKQIYQISSIPHDWLFKRIDAACHHGGAGTTGASLRAGIPTIIKPFFGDQFFWADRVEALGIGSAVRKLTVPHLTEALIAATTDQKQIDRAKMIGENIRAENGVATAIEAIYRDLEYAKTLIKGHAIASEHREEASDPEHSTIRSYRGHSPARTGTHSGNSSFDSTNRGAVSDWSVISDSEEASAPTHS

SEQ ID NO: 7894 - protein, 1206 aa, Friedmanniomyces simplex
MASSRQSTGSLKAKVRQGINKVRDQRRVSMDVPERFQIEDNEEDVTAVNEDNQGYAQQSLYGMIGATHSRSGLQLQGHFQPDSGSESGGETETEGSGRNSKVPSTAASQASSNRSSVDEQRQSPKPEASRHRKNKSEGKGLRSFLRPIRERSDSQPPEFMTHSGFLPAREKATEEPERPASAGGIRSDAPMLDRKLHARARAEMDASTTSTTSRRSKEGSSSEGAKKRASAVDLPAAVAGIFGFREPEDIICEYPCWYLQSVLLQGYLYITKKHVCFYAYMQKKGHATIKSGQLAKQGKRNPRYRRYWFALKGDVLSYYTNAADPYFPSGTVDLRYGISADLVPEKGQDKPKDTCLFTVTTDNRTYHFRADSATSAKEWVKQLQKVIFRSHNDGDSIKISLPLENVVDVESSPLNDMAETIRLRVIDNDQTYSVDEYFFTFFSHGKDALHLLNVLTADNEIRKAPQGKRGLSYLGSSPKDYYTKFSGAMAGGKRHYSEADGLAPEDRIEDPEDDLDTVEHERRFQQHFALPESERLLAVYYGSLHRVLPLYGKVYIGTRNFCFRSLLYGTRTKLVVPFKNILNLEKEKGFRWGYPGMVVVIRGHEELFFDFSSNGLRDDCVVTVLRTLDAVRALQESVILTVDEKKDADAAAAENSLLSGARKDVLADRDAELSETLGQIESDTPIIFDDPNASILDFKPTKAMRITCLTIGSRGDIQPYIALCKGLLADGQRPRIATHQEFKGWVEKHGIEFAPVEGDPAELMRVCVENGMFTPQFLYKATSQFRQWFDNLLTSAYDACKGSDLVIESPSAMAGIHIAEALGIPYFRAFTMPWTRTRAYPHAFAVPSRKQGGAYNYMSYAFFDNLFWQISASQINKWRCKHLGLKPTSLEKLQPNKVPFLYNFSPSVVVPPLDFSDWVRVTGYWFLDEGTAWPPPDDLMAFINRARADKQKLVYIGFGSVTVSDSKQLTQQVVDAVLKADVRCILSKGWSDHFDKKDASVPEVPLPPSVFQIRSAPHDWLFQQIDAAVHHGGAGTTGASLRAGVPTIIKPFFGDQYFFATRVEDLGVGIHLRKITVNSLGKALWIATHDDRMRGRARVLGEQIRNEDGVATAIKAIYRDLDYAKTLIKKREVKIDGGGEVEDTEEAWTFVENDSDGDVARLGEPEVSWSSSTQGLRGWDGGGGVGGRGKRTSLGSMVLKAGQKAR

SEQ ID NO: 7895 - protein, 1316 aa, Jaapia argillacea
MRAGTQTLIQALQSIPWADDQDNDDEIVNHNISAAEIESDEEDKPSVQLSSSLHTIHRPMARSRRAGTNLKAVFNGSDTSEPSDDEQEPDQIYTSEPEDTDFEVATPRIPDHTRTTSNPEGRNTIPSRSIHGRMGSHSTVMTRTGSMATVRLQRRARLADKLREVFDLDGIEEVISEMPCWLLRSVLLQGYMYLTNSYLCFFAHMPAREDQVLKSGSLHKKAQRTKRWIKHWFVLKNDVLSWYQSSSDPYFPHGMVDLRYAMSCEHASEKEFRIRTNEKTIILAADSIPSRDEWVKAIRKVMFKAQNRGDSIAIPYSAIIDVEKSAAIDFSETIEVKVLDKDENYAVDSYFFAYFHELPVALDQIRDAVRNNRAVSQTSSPLPVMDTTTPRVSTALPVGPTHPTTERAQTVPTPDTPRASAFRLASLWRPFQDSPPIHRATSAPTPERPEENEEFTHISKRTSFIPHTSSPDDLTHAESSDSSLARPSTDNNTPKLHPSVLSVTDHTYPPQTTPGFYDLPSKDSSSSSWGVPTWLRVPSRKVFTAPFGSSSTTEHGSTVPIASVTEIYSTNESPTSSNQSGETGFSVLDVPDATIDAAITAKFRAAFALDDKEVLLGYFPGYIYRLLPVYGRLYISTNFFCFKSSGPLASRTRMMLPIRDVLATEKSKAFHFGHFGLVIIVKGHEELFFEFGLEERRVSFIHLLKRQMEDSQRRLANGESPTPGRREASILEAFDSRTSLVRANEPKPPPESMTESLPAIMFTSASSTFLTFKPTKSLHFTFLTIGSRGDVQPYIALAKGLKADGHRVRIATHGEFKQWIEAHGIEFGYVGGDPAELMRICVENGTFTVSFLKEGLMKFRGWIDDLLKTSWEACQGTDVLVESPSAMAGYHIAEALKIPYFRAFTMTWSRTRAYPHAFAVPEHKMGGGYNYMSYVMFDQVFWRAISGQINRWRRNQLGLASTNLDRMEPHKIPFLYNFSPVVVPPPLDWPEWIRVTGYWFLDDAEVGSKTWDPPPSLVKFIDSAHNSGKKVVYIGFGSIVVSDPKAMTHCVVEAIVRSGVHAILSKGWSDRLHKTGSEVSKPEEPLPEQIYPINSLPHDWLFNRIDAACHHGGAGTTGASLRAGIPTIIKPFFGDQFFWADRVEALGVGSGVRKLTVEGLTEALVAATTDPKQIARAKILGEEIRAEKGVATAIEAIYRDLEYARSLIKRGAPEDVVPDVENTALRDSQDSTPQSTLERPGTGDSSSERASEDWSVISEHEGQRRTSFGSRQSEIKADQTAAKRSSLSAAVLSVFPTGLTIGSPLSSPRSPSRPRT

SEQ ID NO: 7896 - protein, 627 aa, Solanum lycopersicum
MDQTSPEVSMAEPSTKFNKRSSSSSSGELSVTVVKEDDISTAGAGADVGSREEAVGGSASNGVTNSSGTSGMELTRVSTLPSENPQSPSDQPKLGRSKTEKPTHSSGFAQEAAKIFDDKISEQQKLKLLKRIATVKDDGTVEFEIPGDVETTEVLGTGSESVHTAVEDEPLDATELQYFPPMQIVVLIVGTRGDVQPFTAIGKRLQDFGHRVRLATHANFKEFVLSAGLEFYPLGGDPKVLAGYMVKNKGFLPSGPSEIPVQRNQMKEIIYSLLPACKEPDMDTGVPFKADAIIANPPAYGHVHVAEALQIPIHIFFTMPWTPTSEFPHPLSRVKQPAGYRLSYQIVDSLIWLGIRDMINDLRKKKLKLRPVTYLSGSQSSELDIPHAYIWSPHLVPKPKDWGPKIDVVGFCFLDLATGYEPPEALVNWLKAGPKPIYIGFGSLPVQDPQGMTDTIVKALEITNQRGIINKGWGGLGNLAEPKDFVYLLDNVPHDWLFLQCAAVVHHGGAGTTAAGLKAACPTTIVPFFGDQPFWGERVHARGVGPQPIEADQFTLDKLVHAIRFMLNPEVKERAIELAKAMENEDGVTGAVKAFFKQLSRTKNEPPRLPKPASTFSLRSCFGCSST

SEQ ID NO: 7897 - protein, 624 aa, Lotus japonicus
MADLPENRRRSSSSSSSSSDLSVRVERELGDGNNGSTGKDVEEKSDAVGNGDSIDNCGSSSSVSGIPGGLPKVTTLPPDISHGDKSESSPSNFKLEKSKTERHRHLRPGDAAQIFNDKIPVQEKLKLLNRIATVKDDGTVEFEVPGDVEPEAFGARSKHVNNVVDGSLDATDLHYIPPLNIVMLIVGTRGDVQPFVAIGKRLQDYGHRVRLATHSNFKEFVLTAGLEFYPLGGDPKVLAGYMVKNKGFLPSGPSEIPVQRNQMKEIINSLLSACKDSDLDSGVDFKADAIIANPPAYGHTHVAEALKIPIHIFFTMPWTPTAEFPHPLSRVKQPAGYRLSYQIVDSLIWLGIRDMINDLRKKRLKLRPVTYLSGSQGSDTDIPHAYIWSPHLVPKPKDWGPKIDVVGFCFLDLASNFEPPETLVKWLEDGDKPIYIGFGSLPVQEPKKMTEIIVEALETTGQRGIINKGWGGLGNLAEPKDNIYLLDNIPHDWLFLHCKAVVHHGGAGTTAAGLKAACPTTIVPFFGDQPFWGDRVHDRGVGPPPIPVDEFSLPKLVNAINFMLDPKVKERAIELAKAMENEDGVTGAVKAFFKQLPQTRNKTEPDQQPLPSSVFSISRCFGCS

SEQ ID NO: 7898 - protein, 1441 aa, Phytophthora nicotianae
  MOD_RES (1106)..(1106): Any amino acid
MPRECKFHEWNQRFKATLHKESKALAIAPPSEDVRTAGIAVHGPDGRIKVDVAEEEEIDLDALRRRSRSTIDEEDDLLLERASLNGPPQLNICIMIVGTRGDVQPFLAIAQRLQQDGHRVRLATHAIYRDFVTSYGVEFYPLGGDPKELAAYMVKTGGHLIPTKVETIQKDVPRNLQMIDEILHSTWPAVSAADPEGGGPGVKGKPFRAQAIISNPVTYGHIHVAERLGVPLHIMFPQPWVPTTAFPHPLANMPYTGKAQKRNYLSYKLVDLLMWQGTEGIVNEFRTEVLGLRKIRKGDGGRDILLDLHIPHAFMWSPELVPKPKDWGDLYDVVGTVVLKGTASSYTPTPELEAFLGTDEGPIFVGFGSMVLEDPKATTKMIIEAAKQANVRVLIQSSWSDMAGDLTIPDNIFFLGNCPHDWLMPRVSAVVHHGGAGTTAAGLLAGKPTFIVPFFGDQPFWGWAVQRAGVGVTPCPIEELTTEKLRAAFESLQSTEMRSRALGIQQKMQQEDGAEEAVRCFYRHLPVQDMRCDLDHVRVATKWCRKNKLKLCEVCDFVIASQPQNFARKVVDYHFVDYTARGPAHGFAGASAGAAAFFHELGGAFKDVVVKPARGFREEGPKGAVIGVVKGVSGLVIRPVHGVALFADHIAAGHANYFNETGRRKRGSVFDKTFMAALGKENGLIDSYTSGGSTEEIETHRCIGPKREVRRKVELNVSDEDKLKYQARFREIMSEKENHRDSLDRIDRNSSVSSNGSDAESESSPREGISILSADFTATGNIGVKFNVGPKSPDTISESKIEEWRQYSKLQRVKSERILKIFLGTTVPSMNICLATIGTWDNNVKQLVAIGMRMAADGHRVRVAANEEFRADIVERGLEFYPLAGAVKNIHDFIKYLHDTKNANVIQKHKAGRPVLGPFKDLVYSLWPAANGADPHGRGQNIPGEHFRADALFWHPLLFGHIHIAERLGIPLQCFSLVPLSPTFAMPHVLSAFLMDDISQLGREFKKTNWLSYGVVDTVLWRGMEDILNDFREHIGLRGHCHQASPLVEWRIPHVYLWNPSLLQRPVDWGRELSVAGYVTLKDEREMEKMRKFKWSRSLNDFTLEXCNPVLYFGVSTYCLESLQIDQLLRQIDEAAEQANVKIIFQAREGRSGRSLYHSENIYEVESDFPYSLILRKVAATIHWGEPAIVEEGLAAGKPVGICVSVSSQYYAACMCVTAGVGIPPIDLRKCTVESLVSSFKHILQPEIRDKAQEVSQTFQPKQALEKAVESFYMNLPLRAMRCDIDKDKVARIYDPRLELKLSFEAYIAIQPLRTHDDTDDVSYKPLWYDGRRPAKFSLRDIAGDHEPRDQKPIHGLESIRKALTSFASHESTDSAPEAPRSVLSRLTSRVAMVVEKPQYWSTPEQEVIESKAIVAAYERALQQRATQQPKSKPRKRSMHH

SEQ ID NO: 7899 - protein, 1279 aa, Puccinia graminis
MDPPTTPIPGPSSPPFSTGPSLHSTPVRPSLSFAHHSLGSTASFVGILKAAALSELENSDFYGSSRSPDKKASIAQQKNSHKNLKAKLELDSEDDDEDAEEEEDDDDDDEDAEEEGTEDEDDDGESAQDDLVDTPPELSPKFNSFRGPSQLGYPSPKALQGLACELINQQKRVADLAVRKGINSSTFTPEPSSHRSSLNQSTPRCSSPLQISRKDYSGSAPITVSDSNNTTQSSCADSESHVSSEERLHRLEEQFGVWPGKDAQGQPETESWIAQVPGVLYRSVLVNGLIVLTDRRLCYLAYLPTFDKGQIIRSGSVTVKADSRFNKRRRRWVELRTDSLTEYRLSTELFRPLSSYHFSEIQRILPISSGQSRTLSLRLLDGRLIVVDFDTSEAADLWHQDFVRALFSFKTDYSNQIKMMLPLSRINSVHRETFESIAKMMVFEVDCAPSFCRSAKSDVIEQHSDHPSTPERPRIELSYYLKHDPFDDTVIDAITHAKHNASQHLFPDSTPAPLLELLDHSPAEDEAEAENITSGKADSNNSCNSKLANRFMKAFGLDASEKLTVYSCALLRTLPTLGHMVLSNDYFCFWRRGTVITQDYKLRIPIKDIGQVKEATAFGFTRFGIAIELAGAPDIRLDFSSKSTREEVMQALEDHAQAAKAEEKRINRRLSNMPIPKPLGQNTEQFKLASPALKKQRPVVIDKQQIERPVKAMKIICLAIGSRGDVQPYISLAKRLMQDGHTVTIASHPEYRPWVESFGILYRDVGGDPAALMKLSVEHPFFSTGFFKEGLGRFRTWLDDLFMESWLACRDSGAELLIESPSTFAGIHIAEALRIPYFRAFTMTWTSTSTYPQAFASNIDLGPSYNLLSYSLFDNLIWRAMSGQVNRWRKQTLKIPSTSLEKMQPYKVPFLYNFSSVVVPKPLDWRDHVDVTGYWFLDQSHGEYTPPADLVAFIDAARQDQVPLIYIGFGSVTVSDPTAVTKAIYAAVVQAGVRAIVAKGWSERGNTKNSLDDAPIDPPAQVYDLHSVPHDWLFPQVDAVCHHGGAGTTGISLRYGVPTLIHPFFGDQPFWADRVTKLGAGMRVDSLTTQSLSDAFIKATGDRIMKEKASQVGEKIRAEDGPTRAVNFIYQYLDFALERTEHRIARTSRKKRWVSSVSGCAASQPAASVDGSHPELESPALRKADLPPCSASFENEDPNHLSDSSPDSPSLLPANAQGKLADPPQSPDDGTLTRKKSIAGGPIRSYSHLIKIPNAISPVKSWSKIKKIFLHPKVIPNVG

SEQ ID NO: 7900 - protein, 724 aa, Neofusicoccum parvum
METVRAAAPWTFAMKGRHSLQPDEGPADFPPSYQEATESLLQASAAVRHDGRVDVDLDSKLGRTLSRLFAHPPQIVPSAPPPAYVAAPEFPIRLNIVIQVVGSRGDVQPFVALGCELQKHGHRVRLATHDVFDDFVRKSGLEFYPIGGDPAELMAYMVKNPGLIPNIKTLRQGDIQRKRTMVAEMLHGCWKSCVEPDPLSEAPFVADAIIANPPSFAHIHCAQALGIPVHLMFTMPWSSTRAFPHPLANLKYGSTDPGMGNYISYGIVEWMTWQGLGDVINKWRHSIDLEPVPATEGPNLAETLQVPFTYCWSPALVPKPLDWPSHIDVCGFFFRDPPNYTPPPDLDAFLRAGPPPVYIGFGSIVLDNPESMSATILEAVRTQPFWGNMVAAAGAGPVPIHHKSLTAQNLAEAITYCLTPQASAAAGIIAEKMRAESGVSSAVASFHANLPLEKLQCSLLPDQPAAWKLSKGKGRDKKKYRLSKLAAEILIQDLGLDRKNLKRYTPNPIIIDNTRWDPVSGTSSAAMGTGSDMLMAAAGIIVDPIREYRRGHSPAPSRPESPRPSNSSKTSVTATATTAATTAAAEAAATPKNPDALALIPTTPHDPTTDRDEGPSNRNTAAAMAAASGKSLGRFFGAYGRGTFVDIPLALTEGLRAVPTYWGEEVRDHGKVDGWRSGAVVAGKTFAYGVGEGLTDVFVQPYVGARREGAVGAVKGLGDREERA

SEQ ID NO: 7901 - protein, 1451 aa, Claviceps purpurea
MDTIPALSPNCDREGTAVETSTSNGTGHHSHSASLDLPEPLRQSDTDDETSPNDTTSHRGRAVSVNMNQSIFGLIAAAGSRVDFNTRFDDGSSDDEDGDDATRPESQDLSKTVVLSPRTMDERDGHKKKLSTGQRLLKSLSTLPRRKLKKSQSSRADTAALEVSDDANESTEDPPTPTGAVDVEHSRRLAPVMSRMLQARAQMAARLSFDMERRSSDMAASGDSDESSALAKRLMEIFQFDEPEQVIEEYPCWLLQSVLLQGFLYITAKHICFYAYLPKKANVVAKSGYMFKSGKRNPKYHRHWFRLKGDVLSYYRDSTSLYFPDGQIDLRFAISASIVDKDKDGLHFNVITRHRTYNFKADSAPSAKEWVKSLQRVIFRSHNEGDSVKISLPIDNIIDVEETQMMEFSDTCKIRVIDNDETYAIDEYFFSFFNFGREAINVLRILIDGASSSNKTAGQRIADEEQVLQDTEIRPNSQHLPRQSSPLLSQHSTRQSGQIDRMHSTKLPEPVKATLAPLSPAQTSGLSPRASLECSSRPSMDGRRQMGRRSHEVSSLMREHSPRRTFSAPRRTKSSRRVEETPKHLFNSTESNWQMSTEDPSFSNLTMSAATDDPTASQILQTSEVFRSPTMRRSDESSQNANGKGHDRPVGAESLPTASCPPKHSATTGHMGQLGYHGKDAQQLPRATTPTLQSITKMGSYPLQRAGALADYLNKTSKRMSSLLATESMGYVEKVSGMWKGGRKHYGEHAELRPDEDELEEDSDGKVQTSMERFRAHFALPETEKLQATYFGCIIRVLPLYGKIYISDRSFCFRSLLPGTRTKLILPLKDIETAHKEKGFRLGYSGLTVVISGHEELFFEFSQVDVRDDCTVTLLQSLETCRHLRDSGILHQEEKEQQEAAMAERDALRSARRDEFPQHDMQPPKEAELQPSAPTILMDDPDGSFLNFKPPRSLRITCLTIGSRGDVQPYIALCKGLLAEGHQARIATHAEFQGWIESHGIEFRKVEGDPGELMRLCIENGTFTLSFLREANAAFRGWLDELLDSAYAACEGSDLLIESPSAMAGIHIAEKLGIPYFRAFTMPWTRTRAYPHAFIMPEHKMGGAYNYMTYVMFDNIFWKATAQQINRWRNKSLGLPNTSLEKMQPNKVPFLYNFSPSVVPPPLDFSDWIRVTGYWFLDEGGEYDPPKELSDFIQRARQDGKKLVYVGFGSIIVNDPAKMTQEVIDAVLKADVRCILSKGWSDRISSKGDATATQSPQQQQQQHEEPEMPSEIMVIKSAPHDWLFRQVDAAAHHGGSGTTGASLRAGIPTIIRPFFGDQFFFASRVEDLGVGVGLRRWGSKSFGRALWQATRNERMIVKARVLGEQIRKDKGVDTAIQNIYRDLEYAKSLIKRKIGHNGQLDAEEDDEAEESWTFVGAEEPDPDVVTRRLSEGLGGMVLGEQRRLGGRAVKT

SEQ ID NO: 7902 - protein, 1477 aa, Bondarzewia mesenterica
MSRLSKSQLFTPKTSSVPNLSSSVPDRTAVDEAEAPERSSGSSSPKEAVRRVIGKTGFGGSKSAEIKSQRASRPKSPTGPRRMFSLTRRSKDKQNPSDIGSGDENSGFVRHSSLRSHPGSPRSTSADVPSEANDESPFIRPPSPSQNPPRPSLQAFRGGGSMRAGTQTLIQALQALPWEEDPDNDDDIIHQDLSPVESDSDEDVKRDQPMASSIHTIYRPVALSRRAESQSQLSTISSHSDDQQDIAGSVGASKGSELSDEEIDEDFEVSSSGTSSPVGHRRKEGPQSVLTPVLEGAIGSDSSRIRHGRKPSSGTVKTIKLDRRASLAAKLADVFELSGITEVIAGKNALLVDEVHPPTRTYISDKLISVLLRSHAFERVLKSGSLYKKAPRTKRWIKHWFVLKNDVLSWYQSSSDPYFPHGVVDLRYAISCEHANEKDIRIRTNAKTILLSADSLPSRDEWVKAIRKVIFKAQNMGDTVKIAIPYSTIIDVDKSPAMDFSETIEVKVVDGSEDLSVDSYFFAYFHDLPAALEQIRDAVAKARRFSPHGSEVPTPEQLIDTTVPRSATMPRVGEERTLSAVEQLPKANSTFRLSSLLRPFQDSLPIGRSTSAPDHLDNGEGFTYVQKRNSSSFIPITTSPLSESPPLPSTSSSTNSSIHDQATHSPGSLTPTPSQAGHTYPPLTSANELYLPPVREPSSSSWNVPVPSWLKMPSRRVFPFGGGTGIAHADTLPVDGNGITEVYSSTTSSGSGVSNAPGELGFSILESPDNAVDAETSEKFKVAFAFDEKEALLGYFPGHIFRLLPVFGRFYISTNYLCFKNSNPLASKTRLMLPIRDILATETSKAFRFGHYGLVVIIKGHEELFFEFGQQDRRAAFVHLLDRQIEDVRGREPTARSQGQRDALTLEEYGSNTPFKDDVDPMHAPETMSGSLPANLFASLFLTIGSRGDVQPYISIAKGLMADGHHVKIATHGEFQSWIESYGIEFAYVGGDPAELMRICVENGTFTVSFLREGMQKFRGWIDDLLKTAWEACQNTDILVECPSAMAGYHIAEALRIPYFRAFTMTWSRTRAYPHAFAVPDRKMGGSYNYMTYVVFDQVFWRGTAGQINRWRRNILGLPSTSLDKMEPHKIPFLYNFSPIVVPPPLDWPEWIRVTGYWFLDDANVGAKKWTPPPELVEFIDSTHSSGKKVVYIGFGSIVVSDPKVMTRCVIDAIVQSGVHAILSKGWSDRLTKNVAEVAEPEEPLPKSIYPLASVPHDWLFKRIDAACHHGGAGTTGASLRAGIPTIIRPFFGDQFFWADRVEALGVGTGVRKLTVDNLAQALITATTDVKQIARAKLVGEQIRSENGVTTAIEAIYRDLDYARSLVRHTPRDNEGTDIEDSAIREHDKSLSSLPSRPETRSGDSSGGGAPSEDWSVISDQEDPRSSVSSSRNSEGRDRMLTTKRSSLTAAMLSVLPDVLTASSHRRSRSVSSVSTS

SEQ ID NO: 7903 - protein, 331 aa, Unknown
  Description of Unknown: Oryza sativa Japonica Group sequence
MEAEVASALVGTCMPCNQFVLSYQIVDSMIWLGIRDMINEFRKKKLKLRPVTYLSGAQGSGNDIPHGYIWSPHLVPKPKDWGLKIDVVGFCFLDLASNYVPPEPLIKWLEAGDKPIYVGFGSLPVQDPAKMTEVIVKALEITGQRGIINKGWGGLGTLAEPKDFVYLLDNCPHDWLFLQCKAVVHHGGAGTTAAGLKAACPTTIVPFFGDQPFWGDRVHARGVGPLPIPVDQFSLRKLVDAINFMMEPKVKEKAVELAKAMESEDGVSGVVRAFLRHLPLRAEETTPQPTSSFLEFLGPQKAYVDDVLQFVVWRMNTTRWVTHVLTTNAGM

SEQ ID NO: 7904 - protein, 1406 aa, Aspergillus clavatus
MRPFLDDAKRRVDRRLSASKQSISTSRLLPSVLPDRFKDNHDAQVDFTAPPGGVGSREGHMQYMQQSIFSMIAAVGSRSDFHARFDESSDSDGETEGRSQTESPVKKVLGSSNPVNSQTEQRSGSQTSRKSEKDQSSRGRHHRRTISDHKFLRPFKTSSKPEPDTEPSTGDERLRVTLPRRPRSTTPRAAPILSRMVEAQAQFDSKTPSAGRSQNSSQESSIHSSHESSTSPLSTRLMEMFDFNKPEKVLVEYACSLLQSMLLQGYMYVTEGHICFYAYLPRKSTVAIKSGYLHKRGRKNPKYNRYWFSLKGDVLSYYADPSNLYFPSGHVDLRYGISASLAESKEKGREPKEFQVSTDQRTYHFRADSSVSAKEWVKALQKVIFRTHNEGDSVKVSFPIENIIDIEESPMMDFADTFKIRVVEDDDSYAIDEYFFSFFDSGREALTLLKSLVNENASGHSSRTLSPHADRSPRSDRTRRSRNRWSLTSGTSQPGNGSADTHRKRSASTSHLSLGPDAIPTSPVTRHQDPSESILNSFEQGTESSAVWQSMEDGAESASQILHRSDVFQSPTIHNLDKRACSDERSGRRQAGGTARSTLTHVNANKDGSPGEYSKLGNDGKPDREIRHVIHELDQETQGPSKPGPGAPTLNELVKAGTYPLQRAAGFAEYLRTRSKQMSNLLASESMGYIEKVSGMWVGGRRHYGEAEDVLPDDQAVDPEDKEDGCNYGDRFRAHFALPSTEKLQATYFAYLHRVLPLYGKIYISQKKLCFRSLIPGTRTKMILPLKDVENVEKEKGFRFGYQGLVIIIRGHEELFFEFRTSDARDDCAVTLHQHLESVKYLAESGLLAEQEKDESEAAMAEHRMLQEARLDDYGENDIPPLNESSGLHPIFDDPRASIVNFKPAESLRITCLTIGSRGDVQPYIALCKGLLAEGHKPKIATHAEFEPWVRRHGIDFAPVDGDPAELMRICVENGMFTYSFLKEASQKFRGWIDDLLSSAWASCQDSDLLIESPSAMAGIHIAEALRIPYFRAFTMPWSRTRAYPHAFAVPEHKMGGAYNYITYVMFDNVFWKAIAGQVNRWRKNELGLKATTLDKMQPNKVPFLYNYSPSVVPPPLDYPDWIRITGYWFLNEGVDWTPPVDLSAFIQRAREDDKKIVYIGFGSIVVSDPSALTRTVIESVQKADVRCILSKGWSDRLGDPSSAKTEVPLPPEIFQIQAAPHDWLFAQVDAAVHHGGAGTTGASLRAGIPTIIKPFFGDQFFFGSRIEDLGVGICMKKLNVSVFSRALWEATHSERMIIRARDLGAKIRDEDGVATAIQAIYRDLEHAKTLAQQRSIASSTPFSPTPSAKNTAEQGDDDVEDSEEWTFVGDDNEMDMSRRMRDRAISDAEMLPDRLLTNSIHGAGR

SEQ ID NO: 7905 - protein, 1420 aa, Oidiodendron maius
MSPEEEFKKRVMRKLSKRRKERHRATVDMPERFRDGEDADEDCTAPQGANAYMNQSVFGMIAAAGSQVDFNARFDAISSDEEEGSGPAPSRNLDSQAIKPSQDTTTSTKGGRQQRLSEYAVMEKSEESSRSKPASWSPPAAPMQALELPPEASTPDTPARMLLSSDASVMKRMLEARAEVSTRPSFDMPRQAEEDINALGDGSSESLARRLKEIFGFDGPEPVLSEYPCWLLQSVLLQGYLYLTTKHVCFYAYLPKKLNEVVKSGYLSKSGKRNPKYHRYWFRLKGDVLSYYSNPSELYFPSGNIDLRYGISASVADKDKGKDSTYFTVVTHQRQYNFKADSIPSAKDWVKALRKIIFRSHNEGDSVKISLPIENIIDVEDSQIVDFADTCKIRVIDNDETFAIDEYFFSFFSYGDEALSALKTLAEDTHAQHIPEGLLASPIATDERSSRHGHFKEGATKTSKSSKTTSTVSPFDDSVKATLSPIKSPSDLSPHGGADVRRLSSDAFQKIGRLSVDLSKLSIDGVRRRSASIGRRRSSSQNQIHADKGTVEKDDSPDSYVHSVGEPSSSSALPSASEDTQASASQILKGSDVFKSPTIRRSSSARRQRHDGSPSNRPIRHSSSTHVDISTVKSPSALAQVSIDMSNETQIESATSAPTLQSIVKAGSYPLQRAAGFAGYLNRHSKRMSNLLATESMGYVEKVSGMWKGGKRHYDDQPRLVDDGEALGDGNYDQSSVSEDRFRDHFALPITEKLQASYFGYLHRVLPLYGKLYISHSFICFRSLLPGTRTKLILPLIDIENVDKEKGFRFGYSGLVIVIKGHEELFFEFSQAEVRDDCAVTLLQNLESVRYLRESGLLTVEEKKSADTASAEHKALQVARNRSDANHDLKLPRNIEDTRNEAPPILFDDPRASILNFKPEESLRITCLTIGSRGDVQPYIALCKGLLAEGHKPRIATHIEFKGWIESYGIEFKPVDGDPTELMRICIENGMFTYSFLKEASSKFRGWLDDLLSSAWQACQGSDILIESPSAMAGIHIAEALRIPYFRAFSMLWTRTRAYPHAFAVPEHKMGGAYNYITYVMFDNVFWKAIAGQVNRWRMNELHLPATSLEKMQPNKVPFLYSFSPSVVIPPLDYSDWIRVTGYWFLDEGSNWSPPKELTAFIKKARDDGKKLVYVGFGSIVVQDSAALTNTVIKSVLKADVRCILSKGWSDRLDKKEANVVEAPLPPEIFQIKAAPHDWLFTQIDAVAHHGGAGTTGASLRAGLPNIIKPFFGDQFFSGSRIEDLGVGIYLRKLNVSVFSRALWEATHSERMIVKARALADQIRKENGVDIAIQSIYRDLEYAKSLIKDRGDKTVDDMNEESEESWTFIGDDNDPELIRRIHDWEAMAQSETASNHNVLSESEASGSRSLHETSATSTAA

SEQ ID NO: 7906 - protein, 420 aa, Tamaricihabitans halophyticus
MRVLLSTWGSRGDVEPLAGLALGIRELGAQVRVCAPPDAEFAALFTELGIPFVPLGPAVRSVTAGKTRPTTQDAFRLAAELVAARFSTLGAAAADCDVLLATGLMPAGARSVAEKLGIRYVFACFHPFGLPSRHFRPGERPGQPLPAGETDPKVLWDHDARRVNDLYRDALNSHRTAIGLPAVENVRDYVFGDGAFGDRALADGALADGALGDRPLLAADPILGSWQDSTELDLVQTGAWIRPDERPLPPELVEFLDAGDPPVYVGFGSMAMRSSPDLAGVAIEAARAHGRRLVLARGWAELAPSDAKADCFVVGEVNQQALFPRAAAVVHHGGAGTTTTAALAGAPQVVLPQIADQPHWARRVAELGIGAAHPGQPSTVESLSRELRTALDPETRVQARAVAGWMSTDGAAVAARLLVR

SEQ ID NO: 7907 - protein, 1023 aa, Dictyostelium discoideum
MFQNCSLYYYSYDSNVEGIVYITKSYIAFNPSPLDKQQQQQQQQQQQQPNSSSITSTTYDRDLDTDSDTDSESDFDYPKQSQHDNSVVMVNNNQYKVKEVLMKKALIPIEDIVSVTKERFLLFFNQCVKIITLDHKWIFGSLNNINSFYNLILETWKQIPKTLLDSSSSSSSSSSSSLLSSSPNNNNSDLNINGNSEGSIFTPLESIKIKNKLGLPADEVLITWFNCTNFKGAQLKYGFLYISNNNICFRSKFGFQKRTIVIPLSQVIEIKKYSAFIPNGIKITTASHHEFQFASFIHRNRVYQILYETWLKANNKKSNSSNSLSSSPTITSPLAISPSIASPSITPPSSTPPSSTTPSSTTPTITSPTIHSTLPSTVVYNDIQEIIDGENNSNNNNNNNNTNNTNKSNSFIGNVEEDVDKIKRSIKSLPILKIHSAQQQQQQQPKTTTTTTSTTTTNLISPRLLTPLTITQSPGFSSLVNSPILPVKPLRITILTIGSRGDIQPFIALSLGLKEYGHNVTLATHELYRDLISKEFGLNYQPLGGDPRELMDLCVRNGIFTPKFIKEALSRFRSFIDDLLLTCWKAVQNSNTQVLIATPGCFAGPHIGEVLQIPFFNAFTMPFTRTRTYPNPFAPFASHQMGGVFNLATHVMMEKVLWQPISGQINQWRTETLKIPPWNSSVSINETYRMPYLYCFSKYLVPKPPDWSGEIAITGYWTLKNQANSDSPPDDLIQFLNEESSTENDDIPIYIGFGSIVIDNPTALSLLLIEAIKLSGKRAIISQGWGGLSIDEHNNNNNNNNNNNNGENSDSNKSSLQSNRIYLLKKPVDHSWLFEKVSLVISHGGAGTVAASLLAAKPTIVVPFFGDQFFWGERIKQTGIGTSIPFDILTAKSLSSHIISILNEPSVRAKVNKMSHLLKREDGVKTAIDFIHRYLPFSFIPPREIPFSSAPNSCMGCKQPFTLLHVMKARVHCHCCGKIFCESCTSHKCPIKKYRINTPVRVCDKCFNDLQSNPSSNSFILND

SEQ ID NO: 7908 - protein, 428 aa, Rhodopirellula baltica
MRVWMRILVLTVGTRGDVQPYVALAVGLKKAGHEVQICTCQIFEEFIRSHGIDYAPLNNDIRDFMESEDGRVAMETTTNLFQAVRVGVRLMPKLTGMMHRQVSEMWAAADAFQPDLILFHKKAIGAEDFAERLGCRCALAFYLPLYVPTGESPAFGFPRLPLGRWYNLATYRVIEFITRRSGGRFVGKWRRSQGMSKKRPPYFQHADGSPVAALHAYSPSVIPRPSDWPDHAMVTGYWFLDGATEFTPDPRLLYFLQQGPPPIYVGFGSIFGRDPRATAERVIEAVRLSGQRAILAPGWGGMDLREFDFPETMLSIDAVPHDWLFPQVSAVVHHGGCGTTAAGLRAGRRTIICPFFGDQPFWGRVVHELGVGPKPIPQRRLTPERLAKAISETIDDCEMESRAEQLGKQIRSESGVQNAVRFIDGRNV

SEQ ID NO: 7909 - protein, 885 aa, Trichoderma virens
MLLSRTRSNAAGHIAIDDGLTKDVTSGNVGADGRFELCFHQDAGSLATWCKNLQESSKRVQTGPCSTPICGRRKSTGGFCPPLNIAIHIVGSRGDVQPFIPIAQILSKPPYGHRVRICTHPAFKDFVESQGIEFFSIGGDPEALMSYMVRNPGLVPSRKSVKAGDIGKRRDEMWEIINRAWRSCIEAGDGMGEPIKATDVENVEDLFLADAIIANPPSLAHIHCAEKLGIPLHMVFTMPFSPTTAFPHPLASMNYSGTDPKTANYLSFIMMELLMWQGLGDLVNKFRRQKLGLDTISIMWGFQLLSRLRVPYTYLWPESLIPKPPDWGSHIEVAGYSFLKLASSYTPPPELTAFLEKGPKPIYIGFGSIVVENPDALSDLIFEAVKIAGVRAIISSGWSRVGSKCNVPEEIFLIDNCPHDWLFQHVSAVVHHGGAGTTAAGIAAGRPTVIVPFFGDQPFWGQMIARSGAGPDPVPFKDLTAEVLAESISFALMPSVQEAAQLMAEDIAEENGAEDMAKSFQDRIGLDQFECEICPGRLATHRHKKTGTRLSGFAVCCLVDRGLIQPPELEIIRRKNWYVDEGVEHPLVGFTAAFTDPMVDVATATFDYSHALRNRPQHTKHEDRRQSWIDPWGDKIGNGSVASNGTSPSRRINPTTFTRREMELYAQKVARKSLKTNNADVDTLIRQPSLYDKQKAAWHARERGRNGHLFYLTRATGRYAAELTKVGLKVPVAFFYNIANGFHNYPSCGYAGVEVRRRDQIIDFETGIVAAGKEFTLGIWEAFSGVVIFPYQSVHEEGAKGIGKGVWRGSKGFFSNLGASAFGLPGYTLKGVEKELQKHHITKYKAEIILIRLRQGIEAFRRSSQQERDKVIGCWKAHNCPKKQS

SEQ ID NO: 7910 - protein, 420 aa, Bacillus atrophaeus
MKIKLLTIGTIGDVKPFIALGKELSTRGHHVTICTGKAFKDLAEENGLFFSPIRADFVDLTQSEEGKRMLKGNPLSIFRQVKTVISPMMERMLVDIWKVTKDADAIIYHPKTLGGYDIAEALHIPAFIAHPVPIIAPTRHFTNPILPFSMRNGLLNKTSFKINRFVMSAFYSIINRWRQTTLGLPGKRSIFMDDTMLDNRPIPVLYGCSPSIIPFDEKWKDHVSMEGFWFLDEESWAPSPELLHFLEAGPPPFTVSFSSMPLSNPERVLNILQQAFKETGQRAILITGESGMKQIADGPHTFTAGSIPHTWIFPKSRAVIHHGGAGTTAAALKAGKPMVICPFSGDQPFWARKMKDIGVATAVPLKEKDMSVELFVSSIHEVLSTPSLTNRAAEAAIQIKKENGITRTADFIEEKMEEWS

SEQ ID NO: 7911 - protein, 608 aa, Eleutherococcus senticosus
MPEKDSSSSGEVPVNFEKEVAGGSSSGSELDSKEAVAGSLSNGGSKSPGNASRNFSRVNTLPPEILNSDKLMPPSSQLKLQKSKTERHRHDNILPEEAAQIFDDKIPINDKISLLKRIATVKDDGTVEFEVPEDVEPQTLVVQPENVYNEVDDDPLDSAELQDIPPLQIVILIVGTRGDVQPFIAIGKRLQYYGHRVRLATHSNFKEFVLTAGLEFYPLGGDPKILAGYMVKNKGFLPSGPSEIPVQRNQLKDIIYSLLPACKEPDVDTGIPFRADAIIANPPAYGHTHVAEALKVPIHVFFTMPWTPTSEFPHPLSRVKQPAGYRLSYQIVDSLIWLGIRDMINDVRKKKLKLRPVTYLSGSQGSDSDVPHGYIWSPHLVPKPKDWGPKVDVVGFCFLDLASNYEPPESLVNWLKAGTKPIYIGFGSLPVQEPEKMTKVIVEALEITGQRGIINKGWGGLGNLAEPKDTIYSLDNVPHDWLFLQCAAVVHHGGAGTTAAGLKAACPTAIVPFFGDQPFWGERVHARGVGPAPIPIDEFSLPKLVDAIRFMQDPKVKESAVQLAKAMEDEDGVAGAVRAFFKHLPFRKTAPEPEPVPSRFLSKCFGYF

SEQ ID NO: 7912 - protein, 1556 aa, Sporisorium scitamineum
MSTTSPKSPPQFPSSVGKEESRDASQVAAADLDPFTVDDDAQDDPPKPPPPAQIPDILDTPPFPTSPRLDPWSPRNYSTISSLAGSRELGRPALEPTTKIFTESSASAASPSAPPTRSAQTTTIDNEAAANADQPDVFDVSFHAEPQGLMQMLSLVGSTFFDADTEGYTEDDAEEIEGPRRSQDRNREQQGVVQDGPTQEAHSRQSDHDQHPFDRTVKGRLQALARDDGSDDGSTPQGSRSPLDASVLTIGPSRPKRTSLTQSDISSSRDSAVTRAARKPSNLRSQLHNVSTASMFASASQLSDSGHDQDVGEFRRGSSSFDVDPTDTQDTRVREQRGVSRLPSEAGRSSNRSLDPLLIRPYLEQQPSGQLPTDNSGMDRDRLLQQLKDVFQLDAAETLLLAQPCWLFRSLLLQGHLYLTSGHVCFYAYLPSRDEKTIKTGWLRKRTRRTHRFSKHWASLKAGKLSWFDSDRDPYFPQGHIDLRKVSAIERSNTHKDRFKVTTPARRFTFLTQDEQSRDAWVEALQKETFRAQNQGESVRISIPLETVMNVDTTLSVDGTEMVCITVVDEAGDFSVDEYYFLHLTKPSAFIADLSSLLEQAGRGSVASLLSGDQALNLSRLSIRDSTGATHAAVISRKSLEEVPVLPEVHVPTQRDKETAKLAEATESDIPQAGFPHSVSEDVSRRGSTDKQDEQPTTASTATSAIAVPMSIRKNSQEAPTDAILSTTPRAAALNRLSMESTHTYPPSPSVSDPPTSFDQVQREAERGWAIPDWLKSAPARVLGRGSDASSAATSLPKAPSTGASTRRRRKVLEQWSDDKGDDVSRGESSNTDNEDDILSHSIHSAQSNYSILEADGEEVEPADHASVAAEFRDTFGIGEDESLIGHTHAYLYRVLPVAGRLFVAESHLAFRSSGIAAKTVGRTLMLVPLQDVISAAKHVAFRPGHHGMVINISGYEELFIEISSAHRRDELLSLIEYQLEMIRGGRGSRQSREAVTRERSHALVLRDLSERINDGPAMASMTSSADSSMLSQTGSRLGSRSNSLSQVGGGSSFLSFSPAAPLTFTMLTIGSRGDVQPYIALAKGLQADGHRVRIATHGEFGDWILGHGIEFSEIGGDPAELMRICVENGTFTVSFLREGVTRFRDWLDDLLASAWRACQGSDVIVECPSAIAGIHVAEALQVPYFRAFTMPWTRTRAYPHAFAVPNKKAGGNYNYMSYVIFDQMFWRASSFQINRWRKTLLGLKPTSFDKLEQHKVPFIYNFSPSLVPRPLDWFEWIHVTGFWFLDNPDNSSSKEWEPPVELVTFIRRARERARKLVYIGWGSIVVPDAGAMMRFVLEAVRKSGVCAILSKGWSDRLSVDNKGRSAELDPTLLEDVFQVSSVPHDWLFPQIDAACHHGGAGTLGASLRAGLPTVVKPYFGDQFFWGQQIESLGVGSCVRQLTADNLAAALITATTNTKQIERARKLGEQIRSEDGIGNAIKAIYRDLDYARSRVKRDTRIVERESGDTAMYRKPMDEEQGSEEEDGGHTSDEWSDIGGAASPAQPPDASLSVVLG

SEQ ID NO: 7913 - protein, 793 aa, Colletotrichum fructicola
MSDSKKPMSSESDESLCDSPPPYELHSSGALLSSAAAISADGQVNIDFQSEYPEKLAEELPPFPDDDDATAPTFNDKTVPPLNVVIQVVGSRGDVQPFIALGTALRRYGHRVRLATHDTFAKFVMDSGLEFFPIGGDPADLMSYMVRNPGLIPSMESLKGGDVGRKRTMMKEMLHGCWQSCIEPDPISKEPFVADAIIANPPSFAHVHCAQALGIPVHIMFTMPWTATRAFPHPLANIQRGDNLEPQTTNWLSYGVVELMTWQGLGDVINAWRRKDLELAAIPASMGPGITTFLKIPHTYCWSPAVVSKPADWGPEIDVCGFFMRDEPSFNPPSDLDAFLASGPPPLYVGFGSIVVDDPARLTDIIIAAAKACNTRVIISRGWSKLGEGKPNTNDVFYLGDCPHEWLFKRVSAVVHHGGAGTTACGLINARPTIIVPFFGDQPFWGRVVAGAGAGPLPIPQKELSMERLTEAIQFCLSPAANQAVKQVADIMRRERGVDTAVESFHRNIPAASLLCDMLPEQPAAWTYEVKGKSGRKHLKLSNQAVTYLIDAKKIKASDLKPLRTKEYNTDVTRWDPITGGASSLLGTVTDFTVALGGTFIDPWKEYKRSRASGHEAGRASGSAALAAGKGFASMTGAVAKGGLVDMPLALAEGLHNVPKLLGDKPRDNGKVEDWKSGGVVAAKTFGTGFYDGITGVFTDPYKGAKEGGALGLMKGVATGSLGLFTKPGAGMFGLVAYPAQGIHKSLKSRTGRGHTVWQAKSDLLDRNRRKQREDSPRAGSKVLQVFDAYFAQ

SEQ ID NO: 7914 - protein, 418 aa, Actinophytocola oryzae
MICRPGRLTWGNGESEVRVLLTTWGSRGDVEPLAGLAVALRGLGVEALVCAPPDEDFVRLLARADIPHVPLGPSVRSVVTGPKPTARDAFQLAPALVAARFETLGAVAPGCDALLATGLMPAGARDVADKLGIRYIYGSFHIFGLPSRHFAPGMRPGTPSPREETDKRVLWQQDAQRVNDLYGPALNSHRAAIGLPPVDNVRDHVFTGRPWLAADATLCPSQGMTDLDLVQTGAWILPDDRPLPDDLDAFLDAGAPPVYVGFGSMAAHAPEGVARVAIEAARAHGRRVVLASGWAGLAPVDDAGDCFVVGEVNQQALFGRVAAVVHHGGAGTTTTTARAGAPQVVVPQIADQPYWAGRVADLGIGVAHEGSTPTVDSLSAALGTALAPETRARAGAVAGTIRDDGATVAAKLLLDAAS

SEQ ID NO: 7915 - protein, 1463 aa, Coniosporium apollinis
MDARRMSADKAGRSLRRPGRPLRRVSVEIPDRLKGGEDEEEDVTAPKTLETQYMNQSVLSLITRVGSNMDQRSHFDENQSSGSEDEDVPAQPRTAASTVLFTGAPRRGREQEREGHKSGLKPSHHRLFKSVPKLSLLRPIKERKAARTSMDGMSDSQILPEQQPEEDTAEQAHGVAPVMSRILQAEANMEASEGPRERRASERDVGQKIPRSKTPVSLPQKLMDVFEFEAPEEVIAEYPCWLLQSVLLQGYMYVTQKHICFYAYLPKKTHEVIKSGNLAKRGRRNPKYNRYWCVLKGDVLFYYSDPTELYFPSGTIDLRYGISAAPMDSKDALGFVVETHQRTYTFRADSATSAKEWVKAIQKVIFRAHNEGDSVKISLPTESVIDIEESAVLEYGDTVKIRVIDNDETYAMDEYFFSFWNSSQDAVNVLRIMVSGNGHHVTDEEISTTPPAVRPSQDVSTLGGVARGHDPQDVLSPTVREGVRSTLSPISPSSREPSLPRPSGETLRSSFDRSRRSLDVGRQTRLSSSEVRRSFSSGRSKSVSKDRRRGKSPLSPVLHDSSESATNSLDPETDSSAAIQSIGDTNASASQILSGSAVFNRPTIVRHTTAQSDLSVDRSLRNSQDTARSSDVRKPLPQPLARPQGQQGVGKRQTGAEGLHPPGLDEYNEAPQTGLQRSGSSSAIQDWMRAGSVPLQKASGIAGFLRNRSKRMSNLLATESMGYYEKVSGMWAGGRKHYGTAEGLAADDEIQETEDDEDAEKHEQRFRDHFAMPSSERLRATFFGYLHRVLPLYGKIYISDRHFCFRSFLPGTRTKLILPFKDIENVHKENGFRFGYSALVLVIRGHEELLFDFRESGSRDDCAITLLESLEISHYAQGPNVLSETEIEDAKAAKVEHETLQEARQKAEAEIQLQTPRDLQENAVERPVIFDDTEASIVRFKPDTSLRITCLTIGTRGDVQPYIAFCKGLIKEGHKPRIATHVEFEPWIRKHGIDFAPVEGDPAELMRVCVENGMFTYSFIRETHGKFRGWLDGLCSSAWRACQESDLLIESPSAMVGIHIAEALQIPYFRAFAMPWTRTRTYPHAFGIPEHKRGGAFNYYTYVVFENLFWKLTAGQINRWRRKELGLRSTTLDQLQPNKVPFMYFVSPHVVPRPIDYSDWIDITGYWFLDEATGWQPSAELVSFIETARRDGKKLVYVGFGSIIVEDAAAMTRTVVDAVLKADVRCILSRGWSDRLSKAGTSGDETPLPPEVFRIDQAPHDWLFTKVDAATHHGGAGTTGASLRAGIPTIIKPFFGDQFFFGSRVEDLGVGVYLRKLNTTVLARALWEATHSERMIARARVMGDQIRSVSIPRANLCPRKHSANKVLQEDGVGRAIQTLYRTLEYAKTLIKKRDGISNEADETIEESWTFIGDDSDPELFRRMSEFNPGEHLLSHGQVRGSGMALGSMVLKNNGKRRTSATVA

SEQ ID NO: 7916 - protein, 1413 aa, Macrophomina phaseolina
MASEYNIRDRSARIRPRPNRRPRQSFEIPERLRHGEDEDEDVTAPKSNDPRYTHRSVFDLITHAGSVANLRSRFTHDELSESEEEEDEHAAVARSPDPPAAQDSKQPEDPQTKHRRSLSNRKIFRHLHKLQIKPSKDRRGPPADESMSSSQILTPKPPQTEREHEKVDSQSMSGQIRAKAGMEASAFGSDLRTAHEAFGVGDPSIKDEGNLSQRLMEIFAFEEEEKVVADYPCWLLQTVLLQGYLYITEQHICFYAYLPKKTKEITKSGYLSKRGRTRWNRSWFILKGDVLAYYSDPTDLYFPRARINLRYAISANVTEPKDKTRDATDFTVTTNQRTYVFRADSAASAKEWVKLLQKVIFKSHNDGDSVKISIPLENIMEIEDNPVLDYAETIKIGVVDNDDSYAVDEYFFSFFGFGEEALNLMKRLWDGCRQQHLDLETERPTTPALNSRLATSASVQPGKSISPVRSTIFQTAAGTLSPTSPSFRRQSHSQVSGESTRSSFDRSRRSSDRGRSSSDRRRRSLSRGQNRHSLGPSQSERSGFSPVSSQVRDSSESAYFSMDPDGASSAAIQSINETDASASQILSRSDVFHRPAAELTDSEANPRASQDTARSAKLYPYPRTEQTVSTRSRTPIQSSKELGNDSELRDDKMQASASAYYSGIVSAGVLPFTKASGLVGSLRKNTMALGSRLTTDTMSVYDKVSGMWAGGRRHYAEDGHLIDEDAREMVDEGDAITHNERFRQHFALPETERLRATFFCNLWRVLPQYGKIYVSDRYFCFRSLLPGTRTKLVLPLRDIENVVKEKSFRLTHHALVIIVRGHEELFFDFSRTDVRDDCAVTMHQKLEQVRYLHSSGILNEENILQAEEAKAENDLLQHARSPEKQPAIPPHIGELDQSGAAVIFDDPQASMVDFTPRESMNITCLTIGSRGDVQPYIALCKRLIKEGHKAKIVSHEEFGDWVLSHGIDFAPVAGNPAELMQLCVETGMFTPTFLARAHSTFRGWLGELLETAWNACQGTELLIESPSTMAGVHIAEALEIPYFRAFTMPWTRTRAYPHAFAVREKKMGGTYNFFTYVLFEEVFWKATANQINTWRKKSLKLPPTNLKKLQINKIPFMYNFSPTVVAPPLDFSDWVRVTGYWFLDESQKYTPPTDLTEFIERARRDGKKLVYVGFGSIVVEDPKAMEKSIIEAVLKADVRCIMSKGWSDRLDKEEKTKESKLKDERPKVPPEVHQIASAPHDWLFRQIDAAAHHGGAGTTGASLRAGIPTIIKPFFGDQFFFASRVEDLGVGIHVKKLNVSAFSRALWTATHDDRMITKARMLGEKIRKEDGVGEAVKTIYRDLEYARSLIKWRNRPLSEDDLGEDAEEEWTFVDDDSDPELRRNPEQDQAVLQIKAQLQQIRQEEREEQAKDA

SEQ ID NO: 7917 - protein, 404 aa, Stenotrophomonas sp.
MRLLALTYGTEGDTRPLAMLCHGLIGAGHAVTLLADGGTLGSAQALDVPHAALEGDIHDEVVALVSRGNGVAAASSGLARMALQHVSGWMRQADAAAEGCDAMLTGGLAAFVGMSVGERRGMPVIGTGMIPLTPTRAFRSPFLPPGRSPGWLNRASYGLVNGLIWRQFRRPINAARQQLGQSPRRALWSGLPMLYGISPQLLPPPADWPADHIVCGQWRLPDAPWTPPVDLQAFLDAGPLPVYLGFGSMTGFDRERVLPALLQALAPRRVLLFPGWAGLPTGALPADVFVLGPTPHEALFPHCALAIHHGGSGTTHSACRAGIPSLVMPFAADQFFWADRLHRLGVAPAPLSPKRLDAATLAAAITIAETDATRARAAALGAAMSHEDGVARGVAMIERWLRPV

SEQ ID NO: 7918 - protein, 420 aa, Ktedonobacter racemifer
MRIVIMTSGTRGDVQPYIALGLGLHRAGYHVCVLTHDIFKPMVMQYGLEFAPLTGNPREMVEKVSTQSSPGSEENALRFTRSLAEVSKSNQVALAKDAQHTLTGAHLLLYSPLCFAGSYAAEALDIPAIFAPLQPVLPTRAFPYPMSFSRSLGGIGNRLTHTFVNVSIWQMMRSVMQPIRRDLGLKPLPASGSISWLYRHRQPIMPGYSSLVVPRPADWPDWVQVAGYWFLDAPQNWQPPASLLDFLAAGEPPVYIGFGSMVNRKAEETTYLIVKALERSKQRGIIATGWGGLSNADLPDTIFKLDEAPHDWLFPRMAAVIHHAGAGTTAAGLRAGVPSILLPFLADQPFWTERVRLLGVSPQPIPRNSLTAEKLAQAIMTTISDQAMRTRAAELGRHIRAEDGVGKAVQVVQKVLASHI

SEQ ID NO: 7919 - protein, 1404 aa, Tieghemostelium lacteum
MASIDTSQILRQISLSDSLSSVSKLYDEQHSNHSLSTLEEEDLKSSSDNSTMLNTNNSLIESLHGSRHHLHSSGGNIIIKSNSNINNNNNNNSNNNSNVETTNFDPNYHPPNVYIFNSEILGDFQSTLTDNENVQENQRIKDQIQRELLENLDIFENHQDIGEVCAFCECSLLYNHLNIANLVITSNYLLFLPQQQVQKGFTLESYLNKKGDYFWKKYWFVLSHDSISWYKNSVLKETHYPSGTILLMKIVSIEKISQDESGRPFTLQIMTNNQSYLLQSDSEVQLDQWYQEITRVQKNLTVLVPLSDIVAIQMETDAALFFDSLCITIKRGENCLVTPTSHSNEIFQLLVRLWNLNRGLKNNEPERNLVQNEFQQRFKLSHPVEIIANTQCLLYKDIELSFEGSLYASSDGLYFSSEKNIIIIPIQDLTAIVMDLKSETPETIIIYTDQNEQIYFDIFDDSEKFYDSIVIEYQQNHSNIFFNKYGESPPKPINTSTGITKKESRFSKLISPLPLPSLPSLPSLPSIPLFRSKSSSSISSSYGGSELSNSTSTFSANSTSTSLSSTFHSLFPLLPLDEPAQLSQNCTLYFFTLDSKVEGTVYITKSYIAFAPKETENPKYKKALIPFEDIVNIHKERIAMIFANHCVKIMTLDSKWVFGKLDNFIGFYNACQDTWRSQPNISGSEGIFTPLEAVRIKEKFGLPPDENLITWYNCTNLKGAQLKYGFLYITSHYICFRSKLGFQKRNIVIPFNVVTEIKKYSVLIPHGIKITTNNQVEFQFASLIHRRQVYHLLHDMWKKNKRQSISKPTTPLSTTPPMLSTQSFPLVSQTVKPSIPPLSISNLPQNGQSPTTPLSPPPIHSTMNSPPTSLITSPKAPHDHHHHHHHHHHIKFTGPMKITILTIGSRGDIQPFIALALGLKEQGHIITLASHEAYRSLISNDYGLTFAPLGGDPKDLMDLCVRNGIFTPKFIKEALSRFRSFIDELLKTCWEASKGAEALIATPGCFAGPHIAEALQIPFFSAFTMPFTRTRMYPNPFAPFASRQMGGVFNLATHVMMEKILWQPISGQINQWRTEQLHVPSWNSSISITETYRIPFLYCFSKFLVPKPPDWPSEVCITGYWLLKQHQNQQPHQDLIDFIDRGEPPMYIGFGSIVISDPDSLSSLLIDAIKVTGKRAIISQGWGGLKLTDKEPNDNIFLLDKPVDHSWLFEKMSLVVHHGGAGTTAAGIYANKPTIIVPFFGDQFFWGERIKACGIGTSIPFSTLTVKILSSTILSLLSDNSIKSLVSQISENMKKEDGVKEAIQSFFRYLPVSYIPPRPIPFSQASHCHLCKQSFSLLKDLLSHKLHCHNCGKVFDEACCSKKIPIRKYRMVQPVRVCDTCYPLLLTEENQHHINSNNSTTPTN

SEQ ID NO: 7920 - protein, 1451 aa, Colletotrichum fructicola
MPPPVPAGAQSISFGEEDVKKRVVKKLQKKRHEPQTPTMELPERLKEGDDAAEEDLIPAQGPPMFMNMNQSIFGLIAAAGSRVDFHDRFESSDEESGDDDDRHHTQDGGNDHGLFLHRKQRRRNDEPDVAKTTVLKKDSSSKSEKHKRKISGHKLLRSLPALPRLPRHKSKKESPKLEPPSEEASDASEASPSQEQADDTRDDEDGPRLAPVMSRMLEAKAEMSMRPSFDVERRSSDQLTYSDSADSSGTALARRLQDIFEFDHPEAVIEEYPCWLLQSVLLQGYMYITAKHICFYAYLPKKAHEVVKSGYLSKSGKRNPKYNRYWFRLKGDVLAYYKDPSNLYFPHGQIDLRYGISASVTDKKDGLNFTVVTHHRTYYFRADSAPSAKEWVKSLQRVIFRSHNEGDSVKISLPIENVIDIEDTQMLEFADTCKIRVIDNDETYAIDEYFFSFFSFGKDAISVLKILIEDASSNAKDAARLKAQQEEERQLPAPSARSSMSGSRRAIAPPKLKTTKLPEAVRATLSPLSTHSPSALSPRASMDASRTSFDAFRGFRRRSLDLSTIIRDSSPRRSFSGNRRSMSRNRLDENRRAPHKQGSTDSYVQSSMEDPSFSGMVASSNEDPSASQILRGSDVFQNPTMRRSASASRTELDKQQRREHKSPPALAAYSGQHAATTGSIQDGDKPPATPTLQSITKMGAFPLQRVGAFAQYLNSTSGKLGSMLATESMGYVEKVSGMWRGGRKHYDAPPEIKTDDEDLYEDAEGKIQTSMDRFRAHFALPETEKLQATYFGYILRVLPLYGKIYISDKSFCFRSLLPGTRTKLILPLKDIENVDKEKGFRFGYSGLVVVIRGHEEVFFEFGQAEIRDDCAVTLLQSLETTRYLRETGDLDLDEKEDEENAMAERDALKEARQVEEYNDHELRMPKQSSNISDAPTILFDDPKASFLNFKPPHALKITCLTIGSRGDVQPYIALCKGLLAEGHKPRIATHAEFQGWIESHGIEFAKVDGDPGELMRLCIENGTFTWAFLREANSMFRGWLDELLVSAWEACQGSDLLIESPSAMAGIHIAEKLSIPYFRAFTMPWTRTRAYPHAFVMPEYKMGGAYNYMTYVMFDNIFWKATAHQVNRWRNNTLKLPNTNLEKMQPNKVPFLYNFSEYVVAPPLDFSDWIRVTGYWFLDEGSDWKPPQELTDFIAKARADEKKLVYVGFGSIIVNDTAKMTQEVIDAVLKADVRCILSKGWSDRIKQGDDTGPVKEEPVMPPEIHVIKSAPHDWLFSQIDAAAHHGGSGTTGASLRAGIPTIIRPFFGDQFFFGSRVEDIGVGICLKKWGAISFARALWEATHNDRMIVKARVLGEQIRSENGVETAIQCIYRDMEYAKSLIKRKAGKNAHVEPDDDEESAEESWTFIGKDEPDPDMTTKKLSDMGALPGASDSKPLGTRALKSPSAQPVA

SEQ ID NO: 7921 - protein, 1709 aa, Aspergillus rambellii
MAPKSNKSAKIVHESASDSESSSSAESTRQVEESSESSSESENESATSSGKHLQSSTNGQKGPKSSQAESSRPSRPYKAPFGFKSAKNQPLPAPSTSALLSDLRGKQVFHITAPSFLPLSKVKEVSLAQALQGAPVLKHDGVKYGLPADSQTQSGVSGQTLFLYDTKTATYYRTAADVPTYHIQEMVDLPGGAEYDEMAIKAVKALEKPPRKQPRHLKMRFRPVGSGNAPPETIGSSSEESDAEEPKFIVPIGLEKEKERKRKHQQTEGDGSQPAAEPRKKSKKVSGDLDESGAKEKSKRSSKDRDGKKRKKEKSDDTKRRVDRRLSASRQSISSSRLFSSAFPERLQDDYDAQVDFTAPPGGAKPRDGIQYMQQSIFSLIAAVGSKSDFHTRFDDSSDSEGETDTKPQKTTGRAPQLDTASSQTDGSIAVPSIPGARSASENRGRRHRRSISDHKLFKPFKSTPKPESKQQQDITAPESSMGEELSRASTPRRTRSTTPRAAPILSRMVEAQARLDASSPTALCESPLDGQNDKIPQLSSASPLSLRLMEMFGFEEPEKVVVEYACSLLQSLLLQGYMYVTEGHICFYAYLPRKSTVAIKSGSIHKRGRKNPKYNRYWFTLKGDVFSYYADPSNLYFPSGQIDLRYGISASITESKEKGRDSRDFQVTTDHRTYYFRADSSTSAKEWVKALQKVIFRTHNEGESIKVSFPIENIIDIEESPMVDFAETFKIRVVESEETYAIDEYYFTFFKSGRDAFNLVKSLISDISTKSSPQTLSPQPDGPSRSKRNRRSQGRWSLASTSQLRGIAITDSRRRSVSTSFVASKQDAANTPPNMKQQDSSSSYINSLDQTTESSAILQSMTDTTESASQILNRSDVFQSPTIHTWQQRSLGVDQAGRRHSDETARSITAHGLDGLGLSGERAEIQYAISDSEQDSRDVSRLSATPALGDLVRAGVYPLQRAAGFAEYLRSRSRQMSTLLASESMGYIEKVSGMWAGGRRHYGETAGISPDGRAFYPETKEDSCRDEERFRAHFALPSTEKLQAAYFAYLHRMIPLYGKIYISQNKLCFRSLLPGTRTKMILPLNDVENVEKEKGFRFGYHGLVIIIRGHEELFFEFNAADARDDCAVTLHQHLESARFLVESGSLAPQEKDESEAAKIEHRMLQEARVDASSEQEMRANITESSELHSIFDDPRASIINFKPTESLNITCLTIGSRGDVQPYIALCKGLLADGHKPKIATHAEFEPWVRKHGIDFAPVGGDPAELMRLCVENGMFTYSFLKEATSKFRGWIDDLLSSAWISCQGSDLLIESPSAMAGIHIAEALRIPYFRGFTMPWSRTRAYPHAFAVPEHKMGGAYNYITYVMFDNVFWKAIASQVNRWRMNELGLKATNLDKMQPNKVPFLYNYSPSVVPPPLDYPDWIRITGYWVLNEGSDWTPPTDLTEFIRRARKDGKKVVYVGFGSIVVSDPSALTRTVIESVLKADVRCILSKGWSARLGDPTSAKVEVPLPPEIYQIQAVPHDWLFSQIDAVAHHGGAGTTGASLRAGLPTIIKPFFGDQFFFGTRVEDLGVGICMKKLNVSVFSRALWEVTHSERMIVRARELGARIRSEDGVATAIQAIYRDLEYAKTLARQRSILSATPFSPTPSAKTGDEQDADDDSADIEDWTIVGDDADFDISKRVRDRAVSDAENLPERLFSDIPNLRGLGR

SEQ ID NO: 7922 - protein, 428 aa, Devosia sp.
MVKRIAIATIGTQGDVQPYLALAVSLKERGYSVVLGATAEFEPMARNYDIEFASLGSSIQSFLQTSRFDKAMSQNMLLNAPALLRQGQRIVDTAARLAWNMAQGADAIILNMNTSFGVDIAEALRIPAIMVALQPLNSTSEFPLCIYYSPTFGPTFNKLSYTAMTVQQIYYNLPRNKLRRELMGLESRKKGGFFRNTDGTPLTTLYAYSSLVSPRPRDWPKNAIVTGYWQLRDRSDWQPSPEFKKFLAAGEAPVYIGFGSMPFGAERNTQILKDAVKAWGGRAVVARGWGGINPADLPENIFAFEKAPHDKLFQYVSAVVHHGGAGTTSAGLTLGKPTFVVPQTVDQPYWGRRVYELGCGPKPVRLRKLTPETLATALQDLTTNASYRSHAQALGEKLQAEKGTDNAIKVIERVMAHYVPREESRKRA

SEQ ID NO: 7923 - protein, 1466 aa, Marssonina brunnea
MAPEGLSKKRVARKLTKKRKEGRQVTVEIPERFRDGDDADEDCTALHGRNAYMNQSVFGMIAAAGSQVDFNARFDGGSSDDDDEPAGGPEELRVDSKTRRGKLPAKGEENHRTRFSENKLLRSLSGLGSRSKSREPNNGAGSGLPSIDPSSEAITLKSPSKHGHPRDTMVMSRMLEAKAELSLRPSFDLPRPKPGHLREGAVAEEPASSTLAKQLMDIFEFDAAEDVIEGTRLNGSKSFPISEGTPGHKKLTCVEYQCWLLKSVLLQGYMYITTKHICFYAYLPKKSNEVVKSGYLSKSGKRNPKYNRYWFRLKDDVLSYYSDPSDLYFPCGNIDLRYGISATVADKEKGKDATHFTVVTHQRNFNFKADSIPSAKEWVKSLQKIIFRSHNEGDSVKISLPIENIIDIEDSQIIDFADTCKIRVIDNDETYAIDEYFFSFFSFGKEALNVLQKLVEDTTAQQIPEDVLVSPTQIDSTRSSRSRSIGYTRRNSLQGPKEKRPIQPPPPTQTATPLLEESVKATLSPLGAVSPRASTEISRASSDPFRRSMDLKNFNRRSVDLGRINMDGAIRSVSANRRSSSRPGLDERRHTEKPGSSDSFVHSLEEPGSPAAVLSTSDDTQASASQILRGSDVFLSPTIRRSASATCRRDPDSNNDDSRSDSPSRVTANTAMEAPNPRHTAMTGSMAASNADQVEPSSSAPTLQTLVKAGAYPLQRAAGFAGYLNRHSKRMSTLLATESMGYVEKVSGMWKGGKKHYDEPQGLAPEDNMYDDDEDHTASYGDRFRDHFALPATEKLQASYFGYLHRVLPLYGKIYISDRSFCFRSLLPGTRTKLILPLKDVENVDKEKGFRFGYSGLVVVIRGHEELFFEFSQADTRDDCAITLLQNLESTRYLKESGLLTMEEKESAQTASDEHKSLQQARMEGFADHDVKMPKTAEEARTDGSPILFDDPRASILNFKPTESLRVTCLTIGSRGDVQPYIALCKGLMAEGHTTRIATHREFKDWIESHGIAFAPVEGDPAELMRICVENGMFTYSFLREASSKFRGWIDELLSSAWAGCQDSDLLIESPSAMGGIHIAEALGIPYFRAFSMPWTRTRAYPHAFAVPDHKMGGAYNYITYVMFDNVFWKAIAGQVNRWRRKELGLQATSLEKMQPNKVPFLYNFSPSVVVPPLDYSDWIRVTGYWFLDEGTGWTPPKELTDFIKKARHDGKKIVYVGFGSIVVQDSAAMTNTIVQSVLKADVRCILSKGWSDRLDKKAASAVEEPLPAEIHLIKSAPHDWLFKQIDAAAHHGGSGTTGASLRAGVPTIIKPFFGDQYFYGSRVQDLGVGIYLKKLNVSTFSRAIWEACNSQRMIVKAKVLGETIRSEHGVDAAIQSIYRDLEYAKSLIKRRDGKSSDESVEDPEESWTFIGDEKDPALVKRIHDWDSLAQSGWLAGNLGTGKSGTTTGSEGSGAFDNFEKDDVAA

SEQ ID NO: 7924 - protein, 626 aa, Polygala tenuifolia
MTDLLENRRSSSSSSSSSSGEVPSVGLDPPDVAGNGSHSKEIDNVRDTTTGGVPLNNGGISSSSGGSSRSLSKVNTLPADFSHNDESVSTSSPLKLERSKTERLRHNNLRPEEAAQIFDNKIPVQEKLKLLNRIATVKDDGTVEFEVPGDVEPEALSAGAKHVYNVADDEPLDATDLQYIPPLQIVMLIVGTRGDVQPFVAIGKRLQDYGHRVRLATHSNFKEFVLTAGLEFYPLGGDPKVLAGYMVKNKGFLPSGPSEIPIQRNQMKEIIYSLLPACKEPDMDSGVPFKADAIIANPPAYGHVHVAEALKVPIHIFFTMPWTPTSEFPHPLSRVKQPTGYRLSYQIVDSLIWLGIRDMINDLRKKKLKLRPVTYLSGSQGSENDVPHGYIWSPHLVPKPKDWGPKVDVVGFCFLDLASNYEPPEALVKWLEAGDQPIYIGFGSLPVEEPEKMTQIIVEALEKTGQRGIINKGWGGLGNLAEPKDSIYLLDNVPHDWLFLRCKAVVHHGGAGTTAAGLKAACPTTIVPFFGDQPFWGDRVHARGVGPEPIPVDDFSLPKLVEAIKFMLDPKVKERAVELAKAMENEDGVTGAVKAFFKQLPRKKNEPEPLPTAPTFFSVRKCFGCS

SEQ ID NO: 7925 - protein, 1448 aa, Paracoccidioides lutzii
MPPYDESRSKGGAGRLNTHSTSSNRLSLSHIPERLRIGDDEQEDMAAPPSDTAGRAGMLTHMHQSVFSMIAAASSKSDFHTRFDEYSDADEDTDQPLKNRFLSNDSVDIRGGDSPSTNQLTQIAHGDKPSPSSKTLNERGRSIHRKRMSESQFLKSLSKLPGKSPTGKETTPEPDVTASNEPSAGEAVQIVASTEAPVQGLMREAQARFGESESPPNQTGISEKDRQRKESSLSSLLSARLMDIFGFDRPEKVISEYQCWLLQSVLLQGYMYITERHISFYAYLPKKSHTIVKSGYLSKRGRQNPKYSRYWFTLKGDVLSYYLDPSNLYFPSGQVDLRNGISASLTEHKGKDKDVKDFTITTDTRIYRFRADSATNAREWVKTLQKVIFRSHNEGDSVKISLPIENVIDIEENPVIDFADTFKIRVFESGESCAVDEYFFSFFECGKEAIEVLKKLVNQTPEQQIQHNAFAPDYGRAPRPRSQSVGAVSPPCGTTLHPESVRATLRPWSPLRDRSRSPKISGLRGLMQGHINEPNVAGLGQRRRSESTGRVNVGDHPPERSPEGKLQSSSDSFVQSLEHATEVSAILQSACGTAESASQILNRSDVFQSPTINMLRPSPSEPGDEPRRHSEDTTRFVPSGAEVEVFNQPPTRTQITESLMRSGPVEPQDGGGDSEHDLQHRSAARSASSPTLQELMKVGSYPLQRAAGFLKSRSKRMSNILATESMGYFEKVSGMWIGGRKHYGEGQAVLSDDRMVDPEDEEQGCGHGQRFRAHFALPPSEKLVATYFAYLHRVLPLYGKLYISNRKMCFRSLLPGTRTKMILPLKDIENVEKEKGFRFGYHGLVVIISGHEELFFEFNTADGRDDCAVTLHQNLESVRYLVESGLFAQQEKEEAEAAMAEHQMLQEARLGGLDEQQGSQTLSSSVPLSPATSPILFDDPRVSMVNFKPHESLRITCLTIGSRGDVQPYIALCKGLIAEGHRPKIATHKEFEPWIRHHGIEFAPVEGDPAELMRICVENGMFTYSFLKEASSKFRGWIDDLLSSAWKSCQNSDILIESPSAMAGIHIAEALRIPYFRAFTMPWTRTRAYPHAFAVPEHKMGGAYNYITYVMFDNVFWKAIAGQVNRWRKRELGLRGTNLDKMQPNKVPFLYNFSPSVVPPPLDYSDWIRVTGYWFLDEGSSWTPPTELTNFIEQAQADKKKIVYIGFGSIVVSDPAALTKTIVDSVLRADVRCILSKGWSDRLGDPSSGKVEIALPPEIHQIKAAPHDWLFSQIDAAAHHGGAGTTGASLRAGIPTIIKPFFGDQFFFGSRVEDLGRLNVSAFSRALWEATHSERIIVKAKALGEQIRKEDGVATAIQAIYRDLEYAKTLVRQRSHTLSASQAVALATSTLEETGIDIPDMGLDDDGHGSGSGSGDPDFYGAMEDSWTFVGDETDSDRAKRSGDREEL

SEQ ID NO: 7926 - protein, 1446 aa, Polyporus arcularius
MAQDGQPDTPPAATPTNAVSPPTSPSSASGEPVSDIKGGVVKRAMDKTVDKLGRGKSLLSQSQPSLPPPAHRRMFSLTRGKGKERQTAGEQPISRSQVLSSPPSSPPLSPRKHTRVSGATGEDDDPFITPSSPSLGPSHPESLVFRGFRSMHAGTQTIIQALQAVPWAEDLDNDDDYMNHDAVAPVMTESDGDERVSRLTSSIHAIYRPLARVRRGDPSASSYRATKAPALPTLSDTEDSPRPDESPVSDEDTEGDFEPHIGGNITDAGHSGRISPETILDLDNSIPDVPANAASDRRASTRSGSMATVRQNRRAQLAEKLQGVFELDNINEVVAEMPCWLLRSVLLQGYMYLTDTYICFFAHLPSREDQVLKSGSLFKKAQRTKRWIRHWFVLKNDVLSWYQSASDPYFPHGVVDLRYAISCEPAGEKDIRLRTTQKSIRLAADSVPSRDEWVKAIRRVMLKAQNMGDSIKIAIPYTAVVDVEKSSAMDFSETIEIKVQDKNTDLALDSYFFAYFQDLSLALEQIRDAVRSYRLIPSAQDPPIVVDTTAGRSLTRPHPVERVASSPQAEGPSKPPSAFRLTSFLRPLHETLPLSRSASAPGARDTNEEFTHIVKKADSSFVPATHSGSTSPSEGEPSGRPSPIPSSTSSLTTPTASHHTYPPSTSASMIDTHGSAPLSASAGSSGWSVGMPSMPSWLRVPSRSLFGTPIAPSRPRMEHAATTPPTLSLPTVSEVVSSRASSSSRPTTSTSISGDFGYYSILETPQTTVDSETVEKFRQAFAFDDKENLLGVFSGFLFRLLPMYGRLYVSDNYFCFKSSGPLTSRTRMMLPLKDILATEKQKSFRFGHHGLVVIVKGHEELFFEFVDEERRDGFIRVLQKQLEAVRGRTTSGDLKSPTSTDTRHEALILGEYGPRDVQNMSDSRASSTESAPAFMFTSQSSTFLSFKPERSLHFTFLTIGSRGDVQPYIALAKGLMADGHRVRIATHGEFKEWVESHGIEFGYVGGDPAELMRICVENGTFTVAFLKEGVQKFRGWIDDLLKTSWEACQGTDVLIESPSAMAGYHIAEALKIPYFRAFTMTWSRTRAYPHAFAVPEHKMGGNYNYMTYVLFDQVFWRGTAGQINRWRRNTLGLAGTSLDKMEPHKIPFLYNFSPTIVPPPLDWPEWIRVTGYWFLDAADVSSKKWEPPQDLLDFMDEARKANKKVVYIGFGSIVVPDPKTMTRCVIDAIVQSGVYAILSKGWSDRLVKNAPAQTEPEEPLPRQIYPISSVPHDWLFKQIDAACHHGGAGTTGASLRAGIPTIIKPFFGDQFFWADRVEALGIGSAVRKLTVDSLSQALHEATTNQKLIDRAKLVGEQIRLENGVATAMEAIYRDLEYARSLIKGAASRDMEHDEYFDAEHATIRDYQASSSPPEHPSPSWSASGAVSDWSVISDSDEPSHDSHSST

SEQ ID NO: 7927 - protein, 840 aa, Talaromyces islandicus
MAGEKRKDKEDQSGAAPEPPLHSNSYNPGTCDGDLDPPPSIDWDDPPVYELIGSGDRASTTVVAQDDGRVAISLLTAQSLSIPAPSQQKPYTIPNISNSRCPRLNIVIQIVGSRGDVQPFLALGRELQVAGHRVRIATHDVFREFVTKSGFEFFPIGGDSSSLMAYMVKNPGIIPKLETITSGEISKKRKMVYGMLEAFWRSCIQPDPETNIPFVAEVIIANPPSFAHVHCAQALGIPLHLVFTMPWSPTRAFPHPLANIERTDADLSTTNYLCYGLVELITWQGLSSVINGWRRKSLSLDPVTILTGASIAEALQIPFTYCWSPALVAKPQDWGNHIDVCGFFFREEPSYTPGDELDSFLRSGPPPVYIGFGSIVMDDAEKMTAILLAAVRACGVRAIISRGWSKLGSGQQDTNVLFLGDCPHEWLFKHVSCVVHHGGAGTTACGLLNGRPTTIVPFFGDQAFWGQMVAASRAGPSPIHHKSLNENNLAEAIRYCLTPEAIDAAAEISRKMKAENGVQAAARSFHSNLPVDAMRCDLLPDELAVWLYVRSKKKTPLKLSDKAAFILTENKRVEAKYFKLWVVPKKNPITMRIESAHVFNISYQPKPITIENQRWDPVTAGSSVLLGVLFKFTVGFSQVFTGPAKAFQSKEQGGGKKEAAVHFGKGFGKMVGVLPKATLVDFPLALTEGLHHLPRLYGEEVRNHGQVKDWKSGGVVAGKTFGYGFVDGLSGAVIKPYEGAKEGGWTGFGKGVGKGVMGLVTGPGAGMFGLFAYPFLGMYKSISTSSLSPTQKKILLARQVYGSYMAREREYSAQREGRGSDDATQDLVLEAFDRKTARID

SEQ ID NO: 7928 - protein, 765 aa, Aspergillus flavus
MDSHLYDEPPPSYDVAVSGDRMDASTLVRNDGRVDVTVVAKQAGLNDFLHSNLPTETRPLPDVPLSAITPLNIVIQIVGSRGDVQPFIALGTRLQKNGHRVRLATHGNFRDFVHKAGIEFYPIGGNPEELMSVSIFLTLDRDKFMVKNPGIIPKMSTIAGGEIGRKRQMIAEMLDGCWRSCVEPDPETKIPFVADAIIANPPSFAHIHCAQALGVPLHMMFTMPWSPTKEFPHPLANVKGSGTDASLRNYMSYSMVELLTWSGLADIINRWRVKALNLEELSPRTAAGLMEAMQIPHTYCWSPALIPKPLDWPSHIDVCGFFFRNEPLYTSPEIQEFINRGSTPVYIGFGSIVMDDPAAMTAIIQGACQELGIRAIVSKGWSKLGQGCNDPNILFIDDCPHEWLFKHVAAVVHHGGAGTTACGLLNGCPTAIVPFFGEYLTMTSQPFWAKMVAAAGAGPSPIDHKVLTVKLLSEAIAFCLTRNAQQAAASIAAKMKSEDGVSNAAASFHRHIPWKDVKCDLLPSEAAAWLVDKKRGLKLSHKAMVILSQHKQIDMQHLKPYRAKEMRIEKIYTDPFSSTSAAVLNTMTDFTVGLGKLSTSPTKGMTQMTSSLVKGTLVDAPTALAEGLRNVPRLYGERPERPVPIEGWKSGMTHAGKSLYTGFADGLTGFVTKPYREAKTDGAAGFAKGFAKGSVELFSKPGAAMFGLMAYPAMGIYKSIKKGNLNPTERKIVEAQIELGDYMLQSFPASPAEIEMVLSRFNTLS

SEQ ID NO: 7929 - protein, 1945 aa, Pseudogymnoascus sp.
MVKKESEDSSATMAKMEPKDSKMSAFERKRLENIAANQAIMKDLSTTAKKIIPKAAPKPARSKTPSKREPPVKKEAARPTRTSSRIAGLEADGEGAKRKYEEEFQFAQDEAKAKKMRVAGDLNLSDIAVEGKKWTNDDNFLTSIMRGAKPYERTFDDSDVKTTTDKELKSLREKMSGLELYKTWEPNDIKITPERIYSMGFHPTHDKPLIFAGDKIGNLGLFDASQKGEVDDDGDQVEAPVITAFKLHARTITSLLFPPNHTELYSGSYDSSIRKLDLEKQIAVEVYAPPSMDDDEAISAIDMNSNDPNLIYFSRLDGAFGRHDMRTQKDTEIWYVSEKKVGGFSLHPLHPHLVATASLDRTLKIWDLRKSTGKDEARKPGLLGEHTSRLSVSHAAWSSSGHVATSSYDDTIKIHSYTKAKTWGVGYTITEEDMEPSAVIRHNNQTGRWVTILKAQWQQRPDDGIAKFAIGNMNRFVDIYTSKGEQVAQLGGDGISAVPAAAEFHPTRNWVAGGTASDVKKRVGRKLTKKRREDRRVTMEIPKRFEDGDDEDEDCTAPRGQNGLINQSVFGMIAAAGSQADFHARFDGQDSDDEEDEITEPEDVTRASEASSDLTTSKATTDDRISRHMFHRRKLSDNKILRSLSQLGIRNRTKHAQLSTASSDPVTPEKTKDTERDHTTWSPFKGPPIMSQMLEAKAAAVQRASFDSRRSDYIPGQADGADGRDGAEGSPSDLSIRLMEIFEFDSPELVIDEYPCWLMKSVLLQGYMYLTEKHICFYAYLPKKSNEIVKSGYLSKRGLKNPKYNRYWFSLQGDVLSYYTDPSDKYFPSGNIDLRYGISANVVDKEKTFFEVITNHRRYQFHADSIPSAKEWVKALQKIIFRSHNDGDSVKISLPIENVIDVEDSPVIEFAETCKIRVIDNDETYAIDEYFFSFFSFGKQALNVLRTLVSDSAAKQIPENMLAQHQGNSGSNSPKAGSSRPSLTISTRESKPVVNHGKATSTGLEESVKATLAPLMSSPLHVHSPRGSGDFSRASFDINQRSSSQTRASGRSMEVSRFNLDGNGRNGSPSNDRRSFSRNRLPEKRNSEKHDSSDSYVHSMEESSAAAQSASEDATGSASQILRGSEGFFQPTIHRSASASRRRDDAQLPGGPLLPQTPTAPHHAATMDIYERPKLTQAENVSTPSLQTLAKAGAYPLQRAAGFANYLNRHSKRMSTLLATESMGYVEKVSGMWKGGKKHYDEPLGQGLEDDTDDEGDHSDGAEHRFQSHFALPVGEKLHAAYFGYFHRVLPLYGKIYISNRSFCFRSLLPGSRTKLILPLKDIENVDKEKGFRFGYSGLVVVVKGHEELFFEFGQPDARDDCCVTLLQNLETIRYLKESGLLTQEEEESAAWAVAEHKALQEARQESRQHSHDLELPTTAEGASADTAPIMFDDPRASILNFKPTESLRITCLTIGSRGDVQPYIALCKGFIAEGHRPRIATHVEFKNWIEGHGIEFAPVGGDPAELMRICVENGMFTYSFLKEASTNFRGWIDDLLSSSWLACQNSDVLIESPSAMAGIHIAEALSIPYFRAFTMPWTRTRAYPHAFAVPEHKMGGAYNYITYVMFENVFWKAIAGQINRWRKKELSLPRTSLEKMQPNKVPFLYNFSPSVVVPPLDYSDWIRVTGYWFLDEGTDYKPPKEISDFIAKARADGKKLVYIGFGSIVVSDSAALTKTVVNSVLKADVRCILSKGWSDRLDKVGATEPEILPEEILQIKSAPHDWLFAHVDAVTHHGGSGTTGASLRAGRPTIIKPFFGDQFFYGSRVEDLGVGIYLRKLNVSVFARALWEATHSERMISKANLLGEQIRSENGVDTAIQCIYRDMEYANSLIKRKTGSHHEGLAEDIEESWTFIGDDNDPELMSRIHAWDPRVVLAQSREADVTEPPVPTSRSETPLPSEHESGSK

SEQ ID NO: 7930 - protein, 1602 aa, Candida parapsilosis
MTLRDKLSSITHSIDDTLSLRGDSPEKDEHHDKHHTDDASLKKTRETATRRDSGFGEGKSKNEMTTSQDESGNGPKHEKRKAENHTCGRAKESTEESHTNSELKQSAPRRSDTQESEEDCAMPSGDMNANFFSTLMNNTTLSSGFGSLRNLKTSAMENFLKGKKDGIDEDNHRNHHHHHQQQQHQHSKHLHPGKVSSSTTSGASSPIHSTPNSRPASPQPVHNPHHSNVNADESSHKTLPHDITSGENSSTDESSDEEEEFEASRLAEPGVPRKEADETFLARAENPPSATPMDSEVTSYSTLNNDASAQEEPLTDGDTLASFRKNTIILEDGGNQGLTNDQIEHLTPFQKSVIEKLDPHHIKEGVLVKVRNRQDEPGDGGKLSATRKLLRYKIAERLTQTFELSPDDIFRGNFNAWLVKDVILQGHIYLTEKALVYFAFLPRRYSIEESADPRNFDDSATVVHSGALGMKTAKYGDSKFQTVLTHRYWAILRTETLTIYSSFTDLYFPLKVIDLRTCLYAEIATKEKIKDVTSPISRGSQTPSAIRSGYTSGQITPPIISETASDLDSMLSQEGFEATEDNVEARSSSVWINLVAKKKTYRFQCDNLHSARQWCNTLTKSIFQLRNATTTGDVFVKIPIANIVDFRRRTLFEEEDGIIDEAENDIPLSFSIKYVTNNPQEKKKRDKIKDKFKHAEEEIYLLVPKSGLDFFKTFEDVMQKQATRVQEGHKMFGSKKPELEKTFTSLSPSVNRVVQNLINSNLPEESRENTSAFKKFGISFGLPFKDEITPTFNLPEVELEQDHLSFPRAMSENVFKDLDITFESTFKNLKDASDRWDSDYQKTINAIDNLPIPSLRLDQKDTRKRGFGKNIKLFSNMTAKFSASPIHYTIEDKYYVSESKEREEALQHFQEHFSLYNSRLVASYYCHLIRTVPVYGKLYVAEHDICFRSLLPGVSTKMILPLTNIDGIEPVSGKIYAGTKLTLQGAEELNLEFAFAKSRDDFTNVAWELLDKLHANESFHPKPHEWGPNHNLELSKTRMEYTDSERRRLDDRDNHRDLEIAESKVSLARIKMFEDRLTSASGLDIPIVLEDSPFFKTEMKPSTSYNITLLTIGSRGDVQPYIALALGLQKEGHTVTIATHGEFKDWIEKDHHIKFKEIAGNPSELMSFMVGHSTLSVTFLKDAQAKFKDWISKLLTTSWQACQGADLLIESPSAMAGIHIAEALVIPYFRAFTMPWTRTRAYPQAFLVPDQKRGGSYNYMTHVLFDNVFWKGISAQVNKWRVRELDLPKTNLYRMSQTKVPFLYNVSPCVLPPANDFPDWVKVTGYWFLDEGGKDYKPKKDLVNFIDQAAKDEKKIVYIGFGSIVVKDAASLTRAVVEAVLEADVRCILNKGWSDRGSHKDKNQMEVELPPEVFNAGSVPHDWLLPKVDAAVHHGGSGTTGAALKAGCPSIIKPFFGDQFFYARRIEDMGAGLALKKLTAKSLAKALVTVTEDLKIIEKTKSVSNQINHEYGVLTAIEAIYSDMEYARSLIWAKELHNANYKRHHPDFKAQSGLQTAEVSEDESESEYDSDSTSDEEDADGDLTEREDDERKKHESNLKGKR

SEQ ID NO: 7931 - protein, 409 aa, Streptomyces sp.
MTAGSRGDVAPYTGLGHGLSRAGHEVTLVTHARFEPLAARAGLRFHPLPTDPRAELESSRGRRLHRSATGVGKMVRVVAMARALVGLMTDDLVAAARTSDALLLAASLGPLGHTIAEGLSLPSLGVHLQPLSPTREFAPPMLGVGSWGPVGNRVAGMGVSLAVEQVFAAALPPLRARLGLPRAHTTAGLRARERQGWPVLHGFSPLVVARPRDWRAGLDVAGYWWPYDGEDRLPPRLEEFVDAGPPPVFVGLGSATVPDPRRLGADIVRALRTAGLRGVIQRGWAGLEASGDDMLTIGEVPHSLLFPRMAAVVHHAGAGTTAAGLRAGVPAVPVPIQFDEGFWAARLVGLGVAPRTVPLRRLTADALAAALVRATRDPGYGERARALGARIRSEDGITPVLDAVNRLAD

SEQ ID NO: 7932 - protein, 1410 aa, Rhizoctonia solani
MSDSHDSSDESDGGKGILKRTVEKIGRNTSISRSKRQGDTDSRTHRRLFSLNRHKGKDKAADEVAGILGGHAAGGISSDADASPQKSKSSPRVSRMAATTSDLRRNKNQTSNSRPSMSIMGLGKQDEFGIGSMRMGTQALIQALQAMPWDEDRDEDPPESAAKRGKTRRESASPDSSDEEEQAKADFVLASSIHTIHRPVAHSRLATPAFHQSVHYGLNPPLEAPEDYFSNPLSADEDDGLRDFDDAATPEGIPNPFKDPPRMRLQLPEDKQSKLEGKKRMPPPMRTASMATVRMKRRVKLADKLKEVFGIPEIKEVVAEMPCWLLRSVLLQGYMYLTNTHLCFFAHMPAREDQVLKSGTMSKKAQRTKRWNKHWFVLKNDVLSWYQSSADPYFPHGNIDLRYAISCDAHREKGIRLRTNQKTITLQADSVPSRDEWVKAIRKVSLSFSRRRTMGESVKIAIPYSVIDGVEKSSSMDFSETIEVKVIDKEENYALDSYFFAYFRDLPAALAQIQQVLSDYQDTAPPGEAHLTDTTQAYRGPLQQQHLDRTASAPPSSHQTDSSSGFRISSLLGLRPFSSTGGEEPHKASSISTVHTGEGALMQHDPASPESGAPGYNWLRGKRLFSTPSSIDSGSRFTEGNVSEVISSPRLDQSEPSVSSDGNNLGFSILEASEDGKAADAGMEEKFRSTFALDDKEALLGCIPGSLFRVLPVFGRLYVSTNYFCFRSSQPLTRTRMMIPIRDILSTEKQKPFRFGQHGLVVVIKGHEELFFEFGSIERRDACCNLLEMQKEVLQKQALSPISPNHTQGKRDALILEELEPSVLISDDDPRPAPEVLASDAPVMFASTSSTLLTFKPDRPMHFTCLTIGSRGDVQPYIALCKGLQADGHKVRIATHKEFQSWIEGHGIEFALVGGDPAELMRICVENGMFTVSFLREGVQKGTDVLIESPSAMAGIHIAEALKIPYFRAFTMPWTRTRAYPHAFAVPERKMGGSYNYMTYVMFDQVFWRGISGQVNRWRRQTLRLPSTNLDKLEQHKVPFLYNFSPTVVPPPLDWYEWIRITGYWFLDDPDDSGSKKWTPPPDLVTFMETARRDGKKIVYIGFGSIVVSDPDAMTQCIVEAIKLSGVYAILSKGWSDRLSTKKSNTEPPPTYPPQIYPISSVPHDWLFERIDAACHHGGAGTTGASLRAGIPTIIKPFFGDQFFWSDRVEALGIGSSVRKLTVENLTAALRAATTDVKQIERAKLVGQSIRSENGVRTAIEAIYRDLGYATELFRKDTHVDLDADESEDDETIQESKTPAARRSSLDPVMFGSDSSCGSGQGNGEDSSWSVISDHPPPERVRVESTGFDKRSGESGDSSVSESRTPNAGQTQTSGSRGLSNLPAIGLALLQDTLTAYSPSARGEVPNGKP

SEQ ID NO: 7933 - protein, 1412 aa, Elsinoe australis
MATRNTSQHRRASRQLSRRKRDPGMIKLPDRFKTDDDDEAQEEVDMERGGMPFMHQSVFGVIAAAQSKEDFKSILDEEVSEESGDESSGTVSEPKRPSYGSQVDPAGPSRPKQKKKLSDHKLLRSLPGLRSRHAKDKDERGRKASSPLSSPPMEENTFRDAPVMSQMLQARANAADSLESSNATLTNKASASTTSLRSSRKAPVALPEALKDIFQFDQSEEVISEYPCWYLANVLLQGYMYITQRHVCFYAYLQQKSNTTIKSGYLAKRGKTNPHYRRYWFTLKGTVFSYFTDPSTPYFPSGNIDLRYGISADLEKEKEKDRTKETTFFSVTTDKRTYHFKADSVPSAKEWVKQLQKVIFRSHNDGDSVKISLPIDNILDIEENPVIDFAETIKIRVIDNDETYAVDEYFFSFFSFGKDALNVLKIMTQDTMAAKALLEQTGKEASQPGSGVTSPKIDGEGRPSMNLTVPEIYENVRATIPVADGPRRSMDIIRSGRSSIDGGRRSIDRPRASFDRQQRSVSAASRVSFNKPQARAKSPMPGAFDHSPDSSVTADDSAPQSIMNESTDQSESDPSGSRILSGSGVFRDPTLAASASRRQPESPRLRPSGEFMRSVASSRSASNERRIEKSPLSPKTPSDDFTKPSSAQQIHKAASAPTAEPRQSGSYTESLGGLMRAGAYPIRQATDLAGMLRDQGRRMSSIPRGYYEKVYGMWAGGKRHYADADGLKSEDYVHDPDEESDTAQAEARFRDYFALPESEKLVASYFAHIMRVLPLYGKIYIGSTKLCFRSLLPGTRTKLIIPFKDILNVDKEKGFRFGYSGMVVVIRGHEEIFFEFNTAGLRDDCTVTILKSFDTMKQRVEHVTITEEEQAEAEQAAQENLRLQEARADGYADHDIMLPRDIDEIDHGAPTILFDDPQASLLDFKPSEPLAITCLTIGSRGDVQPYIALCKGLLAEGHKAKIATHAEFEPWIRKHGIDFAPVEGDPAELMRICVDNGMFTPSFIYEANAKMRGFLDTLLTTAWTACQGSDVLIESPSAMAGIHIAEALGIPYFRAFTMPWTRTRAYPHAFAVPNHKMGGAYNYMTYVLFDNLFWQSTAGQINRWRRKVLRLRPTTLDRLQPNKVPFLYNFSPSVVVPPLDFSDWIRVTGYWFLDEATSWVPPPPLLAFINKARSDGVPLVYIGFGSVVVSDSRALTKAIVKAVEKADVRCILSKGWSDRLDDAAKTVPEIPLPDCIMAISSAPHDWLFAQIDAAVHHGGAGTTGASLRAGVPTIIKPFFGDQFFFGARVHDLGVGVCIRKVSEQVLGKALWIATHDARMREKARVLGEQIRSEDGVGNAIKAVYRDLEYAKTLVKRRGRRVEEGQSEEEDLEVEAEGQSESWTFVEGDSGEEVGGKVGKGMGREAVGSPRAG

SEQ ID NO: 7934 - protein, 1457 aa, Exophiala aquamarina
MANNDTPPPKKATGRKLQKRNPKLGRLPSAHIPARLRLGDDAQEDVTAPNRGTNNPGQYMHQSVFSMIAAAGSRTDFNARFDESSDSEEEAIEEEQGDAVAAEPSAKATATVTPEGPKTSSDKKMKRLSGKLVQSLPRLSARSLTKKSKTSTQQPSPSPQSDSTSKSSRSNPRDAPVLSRLLTAEAEYQEDAEASAEIASSLEVPSTRSRGDSSPQTLLATRLMDIFGFAKPEKVVAEYPCWLLKSVLLQGYLYITKQHLCFYAYLPKKSHSVAKTGYLAKRGRTNSKYKRYWFSLKGDVLSYYSDPSSLYFPSGHIDLRYGIAAAVSAEKGKQSDARDFSITTDHRTYNFRCDTPQSAKEWVQSLQKTIFRSHNDGDSVKISLPLENIIDFEESPVVEFAETVKLRVIENDDSYAIDEYFFSFFSFGADALSVLRDLIVQAPGGRSPDDEQSLGSRGDYSSSPGRRPFPQRTTSEGAVSNPRVVTSPTLKEPVKATLMPFSLGEDGRMSPRMSGEFQRTNSPSRSSGDFGAEYGRASFDRGRRSGSTSRLDVSKTRRTGRSPLARNQDSEDSYVQSIDKETDSSTAPLSPTVEAQMSASQILTRSDVFHPPAINRMETLVSMSSDAGRKSSEVGTILSTSQADGSAPIPIGGKTEPGGRPSKDRRTAVQDESGDLDHDKKYSSSPTLQDLVKAGSYPLQRAGAFADYLKNRSVNMRKLLATESMTYLEKVSGMWTGGRKHYGENEGVIPDDRGIDPEDEEANVGHGDRFRSHFALPATEKLQATYFAFLHRVLPLYGKIYISNRKFCFRSLLPGTRTKLVLPLKDLENVDKEKGFRFGYHGLVLVIRGHEELFFEFNSAEHRDDCTITLLHSLESVRYMGESSIFTHHDEDDAEVAKEEHRLLQEARRNSSADHQLVLPDTAEAIYSHVERSAVLFEDPRASIINFKPAESLRITCLTIGSRGDVQPYIALCKGLLAEGHKPRIATHAEFGPWVMKHGIDFKPVDGDPAELMRICVENGMFTYSFLREASAKFRTWIDELLVSAWEACQDSDLLIESPSAMAGIHIAEALHIPYFRAFTMPWTRTRAYPHAFAVPEHKIGGAYNYYTYVMFDNVFWKAIAGQVNRWRKKELGLRSTNLDKMQPNKVPFLYNFSPHVVVPPLDYSDWVRVTGYWFLNEAQGWTPPPELTEFIKKARYDKKKLVYIGFGSIVVSDPAALTKTVVESVLKADVRCILSKGWSDRLGDPSAVKTEVPLPPDIHQIKSAPHDWLFTQIDAAVHHGGAGTTGASLRAGLPTVIKPFFGDQFFFGSRVEDLGVGICLKKVNVSVFSRALWEAVHSERMIVKAKLLGEHIRKEDGVHNAIRAIYRDLEYAKSLVKARVATQEALASAATDLDEGNEIEENWTFIGDESDPELQKRIQDWEAPSRGRGPRVSLDRAGLRAMQGVEPLRKGSIKRL

SEQ ID NO: 7935 - protein, 417 aa, Unknown
  Description of Unknown: Symbiobacterium thermophilum IAM 14863 sequence
MKFAILATGTRGDIQPFVALAQGFSAAGHEAVLAAPRAFESFVRSYGVDFFPMGSDFTALLESPEGKAALRENPIKTMQAVRQTVIPMMRRMLDDAWAAVQGADAIIYHPKALAGVHLAERLRVPCFIGAPVPVVVPTATFPAPAFVSRDLGGFLNRLTYAAVRSGTRPFRKMIDAWRREVLGLGPRREDEFTQGGQPVPVLHAFSRHVVPPPADWPPEAVVTGYWFARRVQVWHPPEALSAFLEAGPPPVYVGFGSVAGLDRDEGTRMALEALSQAGVRGILATGSGDGPRLLSPDVLAIPEAPHDWLFPRVAAVVHHGGAGTVAPGLAAGKPTLVCPATTDQPFWGRVVHQLGVGPAPIPRRQLTAERLAEAVRAATGDPEMQRRAAALGEAIRAEDGVAQAVAEILRRVGALAG

SEQ ID NO: 7936 - protein, 421 aa, Herpetosiphon aurantiacus
MRILIIAFGTRGDVQPMVALGLALQERGHSITLLVSSNFKSWVEEFGLQVATARVDIQQMMLSDHGNDWVKHGANPIKQRNAMRRLLKQHALTMVEDAWQVAQNCDVLISSFTSDVFAVTLAEVLNVVHISTPLQPAMLATRCGPASAAAILPNHESIINYWFGRWVLEPFMWQVGGDFINQFRQQQLKLPAQSVREYAQRLRQTTIIQGYSPAIIPHPSDWPANIQTVGYWMLPPDEAWQMPPELEQFLADGPTPIYIGFGSMTGANPDAFTELLLKAVAHSGQRAIIQTGWAGLGQIELPKTVFRIGSAPHERLFRHVKAAVHHGGAGTTAASLAAGLPTVIVPHLGDQLRWGQRVFDLGLGPKAIPRNKLTVDRLAWAISQAANTPSMQHNAQAMAKTLQAEQGISRAVEIIEQRIQA

SEQ ID NO: 7937 - protein, 1480 aa, Clavispora lusitaniae
MQDNFKGTKLSALERRIMDSLKIEERHEQLSNVLPLYRRVTSALIPPLQYSIGFLHPHEDDSKEEGETEGEENKGEKKNPENLSSDEIDVACPLEEESASNSFLNALTTAVFYASAEPLKSYRKGPSKEKEEQVYSVADETVQEVTVENLKEEANEQLQDSEDEPKFGSVIDEKDIHDASSVSGSDISSDTSTLSEVRRVLTGSGKVPDIDQMTPWEKSVFQKVNLLLNHDQGIFSYSTEEKREEPDFEALPWYIANRLKKTFGLSDNDQFHGRFEAWLVRDVLLSGYIYLTSSSLCYYSLLPGALSEEKDTKDDRKVEEGALGFKLGHYGDSYYNSVHKHLFWAVLTSSNLCLYTSSSEMFFPVKVVDLKTASYCEVLTEPVGTLGQKSEQHDTKLSRSLSDSSLSQLESDASSIADSSDENAESLQGGVWFRIVCDKKSYKFHTRNIFTARHWCNAITKQIFQLKNSNVHREVVLKIPFDKILEFRKNFVLAEADEDIVLDNDTPVTFTAKYNTVIRKKGIDGEQQKNAIPQSGNVSYDFVHFLLFNQGKDVWDAIEKLLADSQKLDVVTESDESTQGYENQGLENEPSIISTLEADLESSMSIIDKIARVNEDVYQLRERERYKFKNGVEEFAKLGKESPEKNNVVSKILSKPMKRKGSSKIFCNSGSSGSTESSLNRILGEDGSGTDFLTDLVMDGHHLQFPRPFSVQTLKSLDLHMSSSTKSRKELEKNYAKLVAKNKEDEDDVDPFLDEQDESSEITNESVYTNETGNTSDIKEGRRGLKQRFKMLYSTSSIAAPRSDLRASSTESLSLKTDQDRESAMKKLRKYFHADPSEELMAIYKVYLRRSIPVYGRLFLGKEKLYFKSLLPGVSTKMILPLKNIAECRKRVGSVVKLAGISIVLHGREVICLEFRSKSARNECERLLSVQSKACQSTPKIERLQQEVELSTALQNSEDSDELLEEIEKKEIEELAYRRVREARVRLLEDRLSTASGIEFPLIIGEDPIFFSEIKSSVSYNFVLLTIGSRGDVQPYIALGKQLIVEGHNVTIATHGEFRDWIVSHGINFKEIAGNPAELMSLMVRHGSMSVGFLKEASLKFRGWVGDLLSTSWKACQGADVLIESPSAMGGLHIAEALGIPYMRAFTMPWSRTRAYPHAFIVPDQKRGGSYNLFTHVMFETVFWKGISGQVNKWRVETLGIPRTNLARMRQTQIPFLYNMSPEIFPPSVDFPDWVKVTGYWFLNEGAGDYKPPDDLVTFLKKARAENQKVVYIGFGSIVVKDAKSLTKAVVDAVLASGVRCVLNKGWSDKLNDEKAEKTKIEVELPEEVFSCGSVPHDWLFKQVDAAVHHGGSGTTGATLRSGLPTIIKPFFGDQFFYASRVEDLGVGLALKKLNAKSLANALKSITTNTEFAMKAQAIAENMKQDTGVMNAVAAIYSELTYAKTLIRSIRLSNEQKRNSDDDLDSSAQLTGSESVDSDL

SEQ ID NO: 7938 - protein, 1383 aa, Exophiala mesophila
MSAPDHAPRRTPSRRLQKRNPHLNRLPSPSLPSRLRGADDDQEDVTAASRGNKTSAQYMNQSIFSMIAAAGSKTDFNARFDESSDSEDDAIQEEDQDDLQHESPRHMTSTFAPLHSTSTSHKKKPSLSGKLAQSLPRLSVRSASKKQTRSAPKPSPSPTSDTTSKSATSNPREAPVLSRLLTAEAEFQENTDLALEESYPEASTSRSRSESSPETLLAIRLMDIFALERPEKVVAEYPCWLLKSVLLQGYLYITKQHLCFYAYLPKKSHSVAKTGYLAKKGRTTAKYKRYWFSLKGDVLSYYTDPSDLYFPSGHVDLRYGLSASLSSDKGRPDTKDFTVTTDHRTYHFRADSAQSAKEWVQSLQKTIFRSHNDGDSVKISLPLQNIIDFEESPVVEFAETVKLRVVENDDSYAIDEYFFSFFSCGQDALTVLGDLVTKAPSKSPQIETSPARRVTQSPDPSPRFRPFSQRAISEGAVLRPRHRSSSPARDSVRATLVPFSLGDDGKMSPRLSGEFQRTGSPSRSSGDFGPDYGRASFDRGRRSGSTSRLEVAKVKRSGRSPLAKHQDSEDSFVQSIDKETDSSTAPLSPTVEAQMSASQILTRSDVFHPPPVRRMATLASVSSEAGLKSSMDATVLSSSPPQDGSAPVPIIDKSDPATRMAKDRRAAVQHDADMDSEKRFSSSPTLQDIVRAGSYPLQRAGAFADYLKSHSVSMKKLLTTEPMTYLEKVSGMWTGGRKHYGENEGIVSEDRGIDPEDEEANVGHGDRFRAHFALPQSEKLRATYFCFLHRVLPLYGKIYISNRKFCFRSLLPGTRTKLVLPLKDIENVDKEKGFRFGYHGLVVVIRGHEELFFEFSGSEHRDDCTVTLLHSLERVRYMVGSGILGHQDEDNAEIAKEEHRLLQEARRKSAGDHQIVLPDTAEAIFSHEDRREVLFEDPRADIIKFKPAQSLRITCLTIGSRGDVQPYIALCKGLLAEGHKPRIATHAEFGPWVIQHGIDFRPVDGDPAELMRICVENGMFTYSFLREASAKFRSWIDELLSSAWEACQDSDLLIESPSAMAGIHIAEAMRIPYFRAFTMPWTRTRGYPHAFAVPEHKMGGAYNYYSYVMFDNVFWKAIAGQVNRWRKKELGLRSTNLDKMQPNKVPFLYNFSPHVVVPPLDYSDWVRVTGYWFLDEAKDWTPPKELTDFIAKARADQKKLVYIGFGSIVVSDPAALTKTVVDSVLKADVRCILSKGWSDRLGDPSAVKTEVPLPPEIHQIKSAPHDWLFTQIDAAVHHGGAGTTGASLRAGVPTVIKPFFGDQFFFGTRVEDLGVGLCLKKVNVSLFSRALWEAVHSERMIVKARLLGEKIRQVSLNSRILFLTYSARPPACSFSDQSDVPLT

SEQ ID NO: 7939 - protein, 1166 aa, Hebeloma cylindrosporum
MRAGTQTLIQALQALPWMNSDNDEDGPPDPCSADESEDDERPTVQRLSSSIHTIHRPLARSHRINIPTSSKPLSQPPPFEDPLEDISASDEDLENDFEETPRLSSDGPLQQAADTAVSSGKEPTFNAMGDRAGSMATVRLHRRARLAEKLKEVYDLDDIREVWAEMPCWLLRSVLLQGYMYLTNSYLCFFAHMPSREDQVLKSGSLNKKAQRTKRWIKHWFVLRNDALSWYQSSSDPYFPHGIVDLRYAISCETSGERGFRLRTNSRTIVLSADSVPSREEWVKAIRKVIFKAQNMGESVKIAIPYSAILDVERSTAMDFSETIEVKVVDKEDNFALDSYFFAYFHNLPGALDQIRDAVRNHRSHSGVSEDKAPAVLDTTVSRSPLTPERPNTVESTTFKAASGFRLSSIFRPFSDPPTTIKGSSTPATSELQSDDYTHVFRKPDSSSFIPLSTSPKPMLPRAHDELSETSTGQSTQSLPPPEHTRDNNSSSWAVGVPSWLKSSKRVFGGSSGTESPTTFISSPVKEVYSTAASSPGPISRSSGVGDMAFSVLETPDMLPDQDTAEKFRSAFAYDDRETLLGYFPGYIYRLLPVFGKLYISTNYFCFKSSGPLAARTRMTLPIRDILASEKSKATRFGHHGLIIIVKGHEELFFEFGAEDKRDAFVHLLERQMEDVRKRLASGESILPSPAHRDALILEEFETRNSTSSEPDPTPLSDTMADSLPAVMFTSASSTFLTFKPKRSLHFTFLTIGSRGDVQPYIALAKGLMADGHRCRIATHGEFREWIESHGIEFGLVGGDPAELMRICIENGTFTVSFLKEGLLKFRGWLDDMLKTSWEACQGTDVLIESPSAMGGYHIAEALAIPYFRAFTMTWTRTRAYPHAFAVPERKMGGSYNYMSYVMFDQVFWRATSGQINRWRRNLLHLNPTSLDKIEPHKIPFLYNFSPNVVPPPLDWPEWIRVTGYWFLDDADVSAKKWIPPPALVQFIDNARANNHKVVYIGFGSIVVPDPKAMTQCVIEAVLRSGVYAILSKGWSDRLHIKTGEAAEPEEPLPPQIFPISSIPHDWLFQRIDAACHHGGAGTTGASLRAGIPTIIRPFFGDQFFWADRVEALGVGTGVRKLTVSTLSEALLAATTDPKQISRAKTIGEQIRAMASQLRSSLSIET

SEQ ID NO: 7940 - protein, 1148 aa, Geotrichum candidum
MGFRRSFNTSSAKARSSSQDCAATLPDSEYPSPDFLKFISKAAMESAHQSIGEEDEDDEDDDLESNPAVNEQDHITGSADSSSKSNCSEPHSKLAKSVHSLMTAHDEKDQKADYITDTLRNQLGVDENDVLLADYPCWLLKNILLEGKLYITNKEVCFLAYLPIVQKSVIMSGRLTRQSRRSSNTYWFVLRNDLFAYYNSSTEVYFPTGTIDLRYAIKAEMVPDDKAPSRSFYLVTEKKTYTFKAESSTVAHSWVQALQKEIFRSRNEGDQVKIKIPIANIIDLEETVSFDIVDTIKIKAIDSDETYSIDDYVLAFLPGSQSFQLPAETIRKTIERVNAESMPDEDIDRLTRSHRTIGKVLDSTIPPGGISPGQSPDRERSVSPSGINPISSLSHTVTKRFSALGSLVSFDSLSLVDKVLLPKESKSHSSTESKSPLSDLESNDSSFAIVSTHLNSPGKPSANNVSDRKKRGKQWYPSTAINKVTELWMGGTKHFEDIVDEDDKYLVPEEDRNESNERFRSHFSLGESEELVASYYAHIQKAIPIYGKIYVSHNYVCFRSLLPGTRTKMILPVKDIENVSTERGFRFGYSGMVIVVHGHEEIFFEFGLSQNRDDAVNIILKQVDLYRNRSSATLPETKVERARLFTYEDAIECNHLMASKYMTSNNVPTEVHELKPLKFVLLTIGSRGDVQPYIALAKGLMAHGHKVKIASHSEFREWVEGYGIEYAEIAGDPGELMKIMIEHGMFSMSFIRDAASKFRSWIDDLLMTSWEACIGADVLIESPSAMAGIHIAEALQIPYFRAFTMPWTRTRAYPHAFIVPGQKMGGSYNYLTYVLFDNVFWKGISGQVNRWRRKTLKIPKTSLDQMQQNKVPFLYNVSPSVFVPPVDFSDWVCVTGYWFLDEGAGDFKPPADLVDFIARAKHDNKKIVYIGFGSIVVSDSNELTRAVIESVQKSGVRCILSKGWSDRDAEHGKNTEHRPEIQLPPEIFQIKAAPHDWLFPQMDAAVHHGGSGTTGASLRAGIPTIIKPFFGDQFFYAGRVEDLGVGIFLEKLNVSQFSKALVEATTNEKMMARAANIGERIRNENGVETAIDCIYREMNYAKSLIKHNNGTETRLGMLGKVFHTGSSSPPPQDEDDEETKTDDSWMVV

SEQ ID NO: 7941 - protein, 1328 aa, Crucibulum laeve
MRAGTQTLIQALQALPWVDPDNDDEPVSHELGPIDSESEDERPSFERLSSSIHAIHRPVARSRQLSISIRPRATQPGTHTQVVDEEEPQETLSSEEEGDDEDFEEDTPRPPNSRPAHIQHQSLPASQVQGVNANPFNSMNNRTGSMATIRLHRRARLAEKLRDVFELDGITEVWAGTYAVEMPCWLLRSVLLQGYMYLTNSYLCFFAHMPSREDQILKSGSLNKKAQRTKRWIKHWFVLKNDALSWYQSSSDPYFPHGIVDLRYAISCDPVGEKEFRLRTHQKSVVLSADSVPSREEWVKAIRKVIFKAQNMGDSIAIPYSAILDVERSSAMDFSETIEVKVVDREEHFSVDSYFFAYFHNLPAALEKIRDAVRTHRTLPDKGFSKGVVLDTTVSRSSPSAAPPLERPLSLPLEPISNKNSSGFRLSSLLRPFSDTMSLGRSGSGSNSVPESLPDAEDYTHISQRSTSSFIPVTTSPKPMDEQSFSTDKIQDGSKLPIQARLPVEHTYPPSTSRASTLPDHPSLSRDSSSSWGVGVPSWLKTSRKVFGGSGQTEQISTSEPGVREMYSSATLSSSPGPISRSSGLGDMAFSVLETPENAIDAEAIEKFRSTFAYDEKETLLGFFPGYIYRLLPVYGRLYLSTNFFCFKSTGPLAARTRMTLPIRDILAFEKSKAPRFGHHGLVIIVKGHEELFFEFGDEEKREAFGLLLERQMEDVRRRLATGDTTMASPGKREALILEEFEARSTSSDSDPAPPPESMSDSLPAVMFTSASSTFLTFKPSKSLHFTFLTIGSRGDVQPYIALAKGLMADGHRCRIATHGEFKEWIESHGIEFGYVGGDPAELMRICVENGMFTVSFLKEGLQKFRGWIDDLLKTSWEACQGTDILIESPSAMGGYHIAEALAIPYFRAFTMTWTRTRAYPHAFAVPERKMGGGYNYMSYVMFDQVFWRATSGQINRWRRNLLNLGSTSLDKMEPHKIPFLYNFSPHVVPPPLDWPEWIRVTGYWFLDDADVSAKKWSPPDDLVKFIDGAHKIGKKVVYIGFGSIVVSDPKAMTRCVIEAVVQSGVYAILSKGWSDRLHVKAGDAGEPEEELPDQIYSISSVPHDWLFRRIDAACHHGGAGTTGASLRAGIPTIIRPFFGDQFFWADRVEALGVGSGVRKLNITSLTEALLAATTDIKQIERAKLIGEQIRGEDGVATAIESIYRDLEYARSLIKRTNRESTDDDEDEEFDAEHSTIRYHDSTFSAGSPPGSFSGYSSSGSIHGAPSEDWSVISEQDDRRSSISSRYSEGRAKEKRTSFTAAVLSVLPDSFAAGSSPRRRSASVSSRS

SEQ ID NO: 7942 - protein, 451 aa, Anaeromyxobacter sp.
MVRRQRPCEAAGRRPAMRIALLTAGSRGDVQPYLALARALARSGHACTLVTQRVFAPLAAEYGVTFHAAGGDDWPTPESVRERVRNGELAELAGKRNSFSQLSLVAALFARHMTRFTADALPACEGVDAVAFAPMAAVAGHSLAEKLRVPFVPALLAPAFSTREFPSVLFPPRASFIPGYNRLSHWAAERLLWRLNRESAIRLRRDVLGLPPYPRSAFELMHRAEPPVLVGVSPNVVPRPRDWAPYLHLTGYWFLDEPSGWNPPARIARFLASGSPPVCVGFGSMVSEDPRGDVRIVAEALDRVGRRGILLSGWAGLDDHAADLPSSILPLDSIPHSWLFPRVAAVVHHGGAGTTAAALRAGVPQVVVPFITDQPFWGDRVRRLGVGPAPIPRARLTAERLARAIACALERGAMTARARDLGHTIRAEDGARLAVEILERELGRGRRRAPG

SEQ ID NO: 7943 - protein, 550 aa, Laccaria bicolor
MAFSVLETPDIAADQEATDKFRAAFAYDEKEILLGYFPGYIYRLLPVSGRLYVSTNFFCFKSSGPLTSRTRMTLPLRDILALEKSKATRFGHHGLIIIVKGHEELFFEFGAEDKRAAFVQLLENQMESVRKRMVAGTSAATTSPGKRDALTLEAFETRSIGSDCDPSPPPENMADSLPALMFTSASSTFLNFKPHKSLRFTFLTIGSRGDVQPYIALAKGLIADGHKCKIATHGEFQAWIESHGIEYGYVGGDPAELMRICVENGTFTVSFLKEGLQKFRGWLDDLLKTSWEACQGADVLVESPSAMGGYHIAEALAIPYFRAFTMTWTRTRAYPHAFAVLQLQNMGGSYNYMTYVMFDQVFWRATAGQINRWRRDLLHLGPTSLDKMEPHKIPFLYNFSPHVVPPPLDWPEWIRVTGYWFLDDADVSSKKWTPPQDLIDFIDNAHQSRQKVVYIGFGSIVVSDPKTMTRCVVEAVLQSGVRAILSKGWSDRLHVKSGDDVESEEALPAEIYPISSVPHDWLFQRIDAACHHGGAGTTGASLRAGIPTII

SEQ ID NO: 7944 - protein, 1487 aa, Drechslerella stenobrocha
MSSEVEDRPTRSTRVDLPARARPRSHSPALPDRFKIASENDLRDVSLSGRGGNFSMHQSVFQMIQAAGSKVDFHTRFDSDIEEEGEGDESSDEEGKQKTMKNTVPGGLKDATKDRARALPELPSADLSASKRLSDSRFLPKNILKSIQQKRHDKRSRPSSSAASTSEDIGSSTELNSSQGSIHIPSTSRSAPVSDLPSLAHSTTTVTNSAAAVAEDLDNDDVLFPEFSITATALSEKVQKIFHLAELEEVQSEYPCWLLKTVLLQGYLYITDRHICFFAYMPKKQDSVLKSGHFYKRGRKNPRYGRYWFTLKGDVLSYYSDASELYFPSGNIDLRYAIHAYADEGSKDHTFTLVTNSRKYEFKADSATSAIEWTKALEKVIFRIHNDGDSVKVVIPIENVLDIEKSPVIEFADTFKLKVVADDESYAIDEYFFSFFSFGAEAFELIRLLVEDTTAQKIPSHLLTQGPSIGAAFASKKSSATSSPARDKCAVSPARSLRNSLVIGVPTVTVQARGGDGTVAPLLREAVRDTLLPVPTSPAVGSPRNSGEYTRRSMDINRRSVDVAHRRSTDLSRKSLDTTEYRSPSLASAIKQKIKSHKHSNSTSTAQSASMDMSSSSYFKSIRSEPSLAESSDAVPISSESEGELAASQLLSGSDIFQQAFPAGTEPSGIDRGRSPTLRNKAGTIAPAEGPPLQVHPPSRTGTDTGVLAPSAEVKKAETSPGQLGRSSLELSSSDKRFAISSPSLTDVYRVGSLPIRGAQGIADWMKRRSKNVASGGMGYFGKVTDMWTGGKKHYDDKAVSPADAAGENADADDEDEGVASPSERFRQRFALPESENLMAVYFGYLSRVLPLYGKIYLGDQHFCFRSMVPGTRTRMILPLRDVENVDKERGFRFSYHGLVVTIRGHEELFFEFASLENRDDCGSTLTRAMDSARQMRQSQLITPEQKANAEIAKREHDMLQEARQEAGHLEHEIKLPHTTNEVAGENAMDVPPIVFDDPHTSIVHFKPQESLRFTCLTIGSRGDVQPYIALCKGLIKDGHKARIATHIEFKDWVEGHGIEFREVAGDPAELMRVCVENGMFTISFLKEASSKFRSWIDELLDSAWIACQDSDVLIESPSAMAGIHIAEAMRIPYFRAFTMPWTRTRAYPHAFAVPDHKMGGAYNYFSYIMFDNVFWKAIAGQVNRWRKKDLHLKSTGLDKLQPNKVPFLYNFSPHVVIPPLDFSDWIRVTGYWFLDESQQDFEPPQEMVDFMRRAREDGKPIVYIGFGSIVVADPQALTQTVVDSVVKADVRCLLSKGWSDRLGKKDASAPEIPLPDCILPIKATPHDWLFRHIDAAVHHGGAGTTGASLRAGLPTVISPFFGDQFFFGGRVEDLGVGVCLKKLNVKTLSEAMWLATNSTRMITKARILGESIRSENGVDTAIQAIYRDMEYAKTLIKNPQLDSPDGTEESWTFVNQDESDAEVARRNSTKDTNSDRSSRATVASEL

SEQ ID NO: 7945 - protein, 950 aa, Sphaerobolus stellatus
MGESVKIVIPYSLIVDVEKSTAMDFSETIEVNVMEKTAGFSVDSYFFAYFRDPGHALEQIRDVVRSYKQSSTGEGVGEVKDTTATRSSGEHSRTPSHSEKTLSPGEHKASAFRFASLLRPFTVAQTAQRSEFPFSDSEPVVASLSASPDELSSSVNTLTTRAYSLPTATPDAGFITGRREVTSSPGTLSDIEDLSLSSDHTYPPPPSPGSRPTVESHGSWNVGVPSWLRMPGRKVLSSINFLHSSSSDRVREVYSPGPSMDQSLDDSSHPHMEFSMIDAKEAPVDPEVVTKFRASFALDEKEILLSFFPGYLFRVLPVHGKFYISTSYLCFRSSQPLVKTRMMIPIRDILRPEPTKGYRFGMHGVVLTIKGHEELFFEFNSIARRDTFVELVEQQCETLRERQLDGGHASPSPAKREALFLEELDVSKSLSESDPDPILESQHAESLPAVMFTSSSSTFLTFKPKESLHFTFLTIGSRGDVQPYIALGKRLLQEGHRVRIATHGEFKEWIESHNIEYAYVGGDPAELMRICVENGMFTVSFLKEGATKFRGWIDDLLKTAWEACQGTDVLVESPSAMGGIHIAEALKIPYFRAFTMPWTRTRAYPHAFAVPEHKMGGAYNYMTYVMFDQVFWRGTSGQINRWRRKVLGLPSTNLDKLEQHKVPFLYNFSPAVVPPSLDWYEWIRVTGYWFLDDADVGARKWTPPDGLVEFIDSAHAAGKKVVYIGFGSIVVSDPGAMTKCVVEAILKSGVYAILSKGWSDRLAIKKPSADQPKESYPPQIYPISSIPHDWLFPPGIPTIIKPFFGDQYFWADRMEALGIGSCVRKLTIDHLTAALITATTDERQISRARAIGQTIRAEDGTGKAVESIYRDLEYARSLIKRGDDSDNEHNHHILSRSPSRGAGGQSSSSSARPASEDWSVISEQDDHHRIPAHVDDHIEPPFTATPLQRI

SEQ ID NO: 7946 - protein, 1506 aa, Pseudozyma hubeiensis
MGLRPLFGSRASVNDIHDSFGTTLEAVKTSESEHADPLEQQHSSHAASSAQEEPLSPQSSQPQGGNGLAGFLNGAALMSHKDSQSRSEDRHDNDVAVPLDSQAQKSDVAAVDANSSDDAAAWKKSRNEAETSDRYESSRARSKLGRTLKKVDAKIRSTIGVNAPPTAQEMRSPYSVGNNDHLTSQNNLGAAELLNDARLETLQHLSDDEEDDSDDQDEDDGDDEEHTLHDKSDQHIENDDDDAKTLRDSDTGPDPAKIQEHVAKLDNANSSAEHRRSGSMEGVRPGDSIRTRAPVEISAEDKMKAIIEEFGECPSVSQPNEPEKLIVDHNGVLMKTVLIKGSLFLTNRRVCFLAYIPDAASNNDNAVEHHQAGLATGKDSSAVRAPSDPNVDNPILKSGPAVIHRPGKLRPKRRVWMELRKDSFNAYSASNKLYKPLLSARLSNLYAILPVDWAQPNVIRFVEGLKYSSVEFKTQEAALDWRKELEAAAFHARNTAEKVRISIPLERIVGTDAADFMHVARILHVDVLVGAVTDSEIAQIEQEHRERADGHHIGRSWSSGNSFLTCPKNPGFKCHVTQVAFGVTHNRAAFIDLLREALKASRSVQHNLGYKEMLQALPSPLLDLQGEADVEEGAADSSTSHDDQKSSLADKFCHAFGLPTRADELHLVKAELVRTLHTHGTIAIGLDYLLFWRRAVGRDLKIKVPLNDLQGVDTYRSMLWHHFGLVVHIRAHADMHFDFTSKENRDMTLHKLQSFIDAKQKQSKESKNNADGQALESGAKSADGVQTTPSKKGPAETLLHDAAAEVPVFEPDVLALLPKVVNMDRDAMRDAIRISPMRIYCLTIGSRGDVQPYIALCKALKEHGHTPVIVSHPEYRGWVEGHGIEYRGVGGDPAALMKLSVEHRIFSPAFFKESIGKFRVWLDELLRECWEECQGADLLIESPSTMAGIHVAEGLGIPYFRAFTMPWTKTSAYPQAFSVPSIEMGPSYNSSSYTLFDQVMWVATSGQINRWRKHMVGIGATDMSKMDADSVPFIYNFSPAVVPMPNDWGDRVKISGYWFLDNPESNWKPPKEMQDFLERARKDGKKIAYIGFGSITIENAEEVSANIMKAVHEADVRAIVAKGWSGRGGSKRKKKKQQHKQHDAKPHLQHKDSTSSHTESEDTATEEEHEPEITIPDDVFVVDSVPHDWLFPQIDIAMHHGGAGTTGASLRAGLVTLIKPFFGDQFFWANRVAKLGAGARVNGLSVSDLCDALKSAASDRVMVEKAQGVGEKIRSENGVATAIEFLYKNIPLANRRTQRRLEREATHDSTDSSYRTNPLSRFGTHSRQNSASGSEVKEKHGQTKRSATLPPVSTSSSEKSGDIHRSSTIFESPADELNSPSSPTSPSSPSSGNRTLLPSLPSLSTLNPLPSSMSSSLKEMIAFHTSTADTTADGEPAHPERSNTTPPGRLAPEDETDEQKMHRLKGYKNAKAEDIRRRKLLLERLEREKLQKEQQSQTGRKEEQHT

SEQ ID NO: 7947 - protein, 843 aa, Aureobasidium melanogenum
MKGHGSIDSDSTLSEDFEAGSLPPPRYDQIYHASHDPETVELGAEGPYHIRDDGRVDIDFNSSVIRAFSKCFPSAPDEDSQPAPPAYESKRPFDPSTASSLKWNIKLNIVIQVVGSRGDVQPFIALGTELQRYGHRVRIATHDMFAAFVRQAGLEFYPIGGDPASLMAYMVKNPSLMPSMKTIMSGEIGRKRQMVAEMLSGCWDSCVLPDQFSGQPFVADAIIANPPSFAYIHCAQALGIPVHLMFTMPWTSTRSFPHPLANLTNVDESHAAANYMSYHVVELMTWQGLGDVINDWRESIELEPINFLDGPALAQMLKVPFTYCFSPGLVPKPEDWPEYVDICGFFFRDDPACTPEPGLVDFLAAGPPPVYFGFGSIVLDDPAKMLSTILGAVKAAGVRAIISKGWSNLDGDASENIFYIGDCPHEWLFPRVAAVVHHGGAGTTACSLKNSRPTLVCPFFGDQPFWGHMIANSGAGPDPLPPRHMTIDSLAEAIRFLMRKETALAAEVIAERMDREQGVQAAVNSFHRHLPLETMQCDLIPDQPAVWTIKSGRREVKISKLAAEIAISQRNSLQKDLKTYRTKPLIIDPIRWEPLSGGISASVGTTVDIGRCLTGMVTEPIKAYSKERRRQDRIDATERLEESQQLAESSSSIHTVTSTKSRGKQPSAGGKAALAGAKSLGWLAPKAIKGAAVDIPLALAEGFRILPKLYGDEIRDHGRVTGAASGFAVGGKTFAYGLYDGIAGLGVQPYKEYKKSGAVGIVTGLGKGLAGLVTKPGAAAVGAWAYPTAGITKTIRSAVYNKSRKLIEVQRAAEGRWLAEQQQWTGSQKIALMEKFNELGSKK

SEQ ID NO: 7948 - protein, 1213 aa, Kluyveromyces dobzhanskii
MPKESSELQQYPSKFTKSMFVDSRAFVKKSLSPVDHLCHSVADLRFASFNSETLESRLQAITKKFDNGSESQSTAEADTVEDVAKPQYMAKSFAGLLATASMCVGMDELGDEEDEDEDELGLMNDAASVFDSKSQTNRTLFEVSVEMNTDAVSQLSTDSKSRKEMIRERLIKKFLPDNDEKYIEEYPCWLLRDIMIQGHVYLTDKHLFFFAFIPNFESEFNLTGSLSFVNGQGLSKGHRYWVVLKGHTLSFHNSSTELYFPLLNVDLREISAVRIDLSEANSTKFELNVNEQSLIFKADSFHSARHWVSSIKKQMFAFQHSETNTMTVKIPLQNILDLEETNILDRSGTLRIRALENSSTYAVDEYFFVFFKGSAQAMKQKVNSLLKDLEMNGSQILIDFNNVDSPTSSDDKELGINNENSELDDRTIGDDKFSTAGTSGVGPNVLESGSPMGQASAGPNSRHSKYPRKVKKKLKSMAGSLKIVSPSRLPKLEDDIIIEHYSPGLINDQTMDYDKDCKSIISRFTPKKFQNVPLMWAADPVHFNSIDGISFPLEDKYTAATDVNTQSNTRFRHHFSFDDAMNLIASYHGYLNKNVPIYGKIYVSDKNICFRSLLPGISTKMVLPLDDVENCYKETGFRFGYFGLVIVIKGHEELFLEFGNKNARDDCEFVIMKVMDIFSHRKSPLQRKSTAEVVHRLSEAASIKLLEEKISEQGFDIPLIVEKNPYFTTVIKPSRSYKFGLLTIGSRGDVQPYIALAKGLKSEGHEVIILTHSEFKNWIVSHGIGFREISGNPAELISLMVQHGSMNMGLLRDASTNFSSWISSLLETAWEGCQGIDILIESPSAMAGIHIAEALKIPYFRAFTMPWTRTRAYPHAFIVPDQKRGGNYNYFTHVLFENIFWKGISGKVNEWREKALHLPRTNLVSMQQNRVPFLYNVSPIVFPPSVDFNEWIKVTGYWFLDEKQSYTPPSEFLEFIKKARELKKKLVYIGFGSIVVNDPDKMTETVIDAVGDAGVYCILNKGWSNRIGDPQAKKIDKELPHYIYNSGDVPHDWLFSKIDATVHHGGSGTTGASLRAGLPTIIKPFFGDQFFYAGRVDDVGAGVALKKLNRASLAKALKEVTTNTRIIQRAKQIGESISKEHGVATAIGAIYSELGYARSLIKARDSSTDKEKAADMQTIEKSLKSGNEAEKVDSNFEESGSGSGSNDGSWLLV

SEQ ID NO: 7949 - protein, 637 aa, Arabidopsis thaliana
MPEISPAELAKVSSSSSSSSSSSSGRASVKIEEIEGGAAASGVVIVSEELETNPKTVVASIADETVAESSGTGNKSFSRVWTMPLEGSSSSDKAESSSTNQPRLDKSKTERQQKVTHILAEDAAKIFDDKISAGKKLKLLNRIATVKHDGTVEFEVPADAIPQPIVVDRGESKNGVCADESIDGVDLQYIPPMQIVMLIVGTRGDVQPFVAIAKRLQDYGHRVRLATHANFKEFVLTAGLEFYPLGGDPKVLAGYMVKNKGFLPSGPSEIPIQRNQMKDIIYSLLPACKEPDPDSGISFKADAIIANPPAYGHTHVAEALKIPIHVFFTMPWTPTSEFPHPLSRVKQPAGYRLSYQIVDSLIWLGIRDMVNDLRKKKLKLRPVTYLSGTQGSGSNIPHGYMWSPHLVPKPKDWGPQIDVVGFCYLDLASNYEPPAELVEWLEAGDKPIYIGFGSLPVQEPEKMTEIIVEALQRTKQRGIINKGWGGLGNLKEPKDFVYLLDNVPHDWLFPRCKAVVHHGGAGTTAAGLKASCPTTIVPFFGDQPFWGERVHARGVGPSPIPVDEFSLHKLEDAINFMLDDKVKSSAETLAKAMKDEDGVAGAVKAFFKHLPSAKQNISDPIPEPSGFLSFRKCFGCS

SEQ ID NO: 7950 - protein, 895 aa, Rhizoctonia solani
MLHGSRKGGAPLKLYITAAYTDDHQRTPLTGGCNTYNTLRLSLAINTMIIPDDYDSKKAPSEHEDQTEYSREIRMGSESDSKQGRSVSASDFPHPPDNSELGPPRYEDIAQSASSVRPPVDVKSEIDPRRESFQTRTSTSSSVREDEPNAEFRTAAMAASAAFQPDGRFQVSIDAVPGKLPRDYAVPINEPGIDSTDFVNAPPMNVNIMIVGSRGDVQPYLALGKQLRQHGHTVRLTTHETFRKSVKDAGLRFFNIGGDPHELMSYMVRNPGLMPGFESLTNGDITRKQMMVAEMLERCWRSCYEPDEAQEGSLSFAADAIISNPPTFAHIHCAEALGIPLLMSFTMPWSPTTSFPHPLVNVRNSQAEPRMTNYLTYGLADAMTWQGLGHTINKFRRKRLGLPSLSVISGSGIIERCGVPWTYCMSPTLVPKPHDWVNHIDVVGFYFLDLATKYTPPEDLVAFLDAGEPPIYIGFGSIVVENPIEMTKTVLSAVNQSGVRAVISAGWGSLDSSTLQDAGNPNVFILGNVPHDWLFERVSVVVHHGGAGTAAIGLRCGKPTVVVPFFGDQPWWADQIHARGAGPAPIPHKQLTVPALMGAIRSALSNEMRAAARRVGELIRSEDGVKKGMDSFHKHLPLLDMRCELDHKKVAVWYSRSHKLRLSAFAAQVLAERGILDVNKLELHRPREYITRVQPSDPITGALAPTLGVVGDVFGGVGGLFTPRPEKGVIKLVKAGPEAVRGILEGLHHGTNNAPKIYGGSVREPGKITGFRSGLREGGKSMAMGLYDGLTDIVREPVDGFKKHGVLGGAGGLIIGLTNAVVKPTAGAIGLLSQPVEGTIQSVRSLMAKPAKERHATRYAEGVGAYKESSEAEREAVIRAFEKKRSRSKGKQKAT

SEQ ID NO: 7951 - protein, 1516 aa, Candida albicans
MSFYKKVTRGLATPLQGSINLFSGSPNVSGDEGTDADNENPEHRTTYHSLSGRVNHDDDDEDVAKLEDIVGFFTGLLNTTTVCAGLGSLNNLKKHYLDEFIKKSALNPLRPQNYGPETSSKLNNNSIEELLNNGDTSLEKVRKMSLYDFDEHTSDSEEEDSADKEEESIAENLKPGKSGKARNHPRDSRTTATLITTQITRTRTATATTATPTPTPTSSVDTDVTDVTEPIGKVTTKIPEEQLQGLNPLQKSVVKNLDPHHVREGVLIKVKNSETPLKNDRQELLEKIQLRLKIADKLQRVFDLSDEDTFCGNYSAWLIKDVLLQGHVYLTKDALLYFAFLPKRFSLENSSEVLDEDNSSSIVYSGNLGLKSAKYGEVVLNTVLQHRYWAVLRAETLSIYSSSTNLYFPVLVIDIKKCLYTEIIDKEKLNREAISPVNRGTYSPNGGLSGTATPRASTLENTASELNSMLSGDSYSPTEDNVETTASTVWFKLVTKKKTYKFSCDSSFSARQWCNNITKLIFQHNNANSNGEVLIKIPISKIAEYNKRALFSEEEEEDRTLDATMNDIPLNVTIKYLGDNDNERKRDKLKRKYKGEEPTIEEVHFLFPKSGVEFFETFDKLVNPVVSDNDNQSSKSSITSTNFSEKAISTLSKSPNHLVQTVLDFNKPVDDDISAFKKFGTTITSPTRIFKATITSPEMTSIDETSLRDSFDSDRLHLPRDMSERALKNLEVPFVTSLKKLEDASKRYEKPHMEHSQTNLASILSDPSEVKKESKTAISKSIKALYSVGTHWSATPNHYFELGKYYVNKVQERDSSQRNFQSHFSTNSKLLASYYGHLLRTVPVYGKIYVSETDVCFRSLLPGVSTKMVLPMTDIEEVRASRGSRLTYHGLRLIVRGSEELDLEFGSSKSRDDFQKVVLSVLERLHSKEGFRPEPYQWGSNFEVELYKTRMEYSDSENREIQQYDNSIDIKFAEKKIEMARVRMFEDRLMAASGLDVPIILEDSPFFKTELRPSTSYNITLLTIGSRGDVQPYIALGKGLVKEGHNVTIATHAEFGDWIKTFGLGFKEIAGDPAELMSFMVTHNSMSVGFLKNAQQKFRSWISKLLTTSWEACQGSDILIESPSAMSGIHIAEALGIPYFRAFTMPWTRTRAYPHAFFVPEQKKGGSYNYLTHVLFENIFWKGISGQVNKWRVEELDLPKTNLYRLQQTRVPFLYNVSPAILPPSVDFPDWIKVTGYWFLDEGSGDYKPPEELVQFMKKASRDKKKIVYIGFGSIVVKDAKSLTKAVVSAVRRADVRCILNKGWSDRLDNKDKNEIEIELPPEIYNSGTIPHDWLFPRIDAAVHHGGSGTTGATMRAGIPTIIKPFFGDQFFYATRIEDLGAGIALKKLTAKTLGDALVKATHDLKIIDKAKRVSQQIKHEHGVLSAIESIYSELEYSRNLILIKDIHNQNYKRHHPVPSGVQTPAYDTDSDDYDDDEDDDESDKDDEEEEEEEENSYDGYDGNGVNNSRSQNSSN

SEQ ID NO: 7952 - protein, 803 aa, Aspergillus niger
MEKDPRLGYSDPGSSSYDQAPPPYSPYNDSGPVVESADVQANGRVNVDLDSSLARTLASIIELQQEDLQNPPPNYSEDQLIKDELLQCDIQLNIVIQIVGSRGDVQPFIALGTELQKFGHRVRIATHDVFSDFVTQGGLEFYPIGGDPAELMAFMVKNPGLIPQISSLRAGEVQKKRAMVNEMLHGCWKSCIEDDPVTKIPFTADAIIANPPSFAHVHCAQALSIPVHLMFTMPWTSTKAFPHPLANLSSSEMNPNVANWVSYGVVEWLTWQGLGDVVNRWRASIDLEPVPTAEGPRLAETLKIPFTYCWSPALIPRPRDWPANIDVCGFFFRDPPSYEPPLELKEFLESGTTPIYIGFGSIVIDDPQKLTEIILEAIAKTGVRAIISRGWSKLGGVPSSNTYYIDDCPHEWLFRHVAAVVHHGGAGTTACGLANGRPTTIVPFFGDQPFWGSMVARSGAGPRPIPYASLNAENLAEAIAFSLRPTTAESARGIALKMQHESGVAAAVRSFHRHLPLDRMRCSLIPNQPAMWIHKRSKKSLKLSKVAVQLLIDNGKLNAKELRCNTINPIHIENRRWDPVTGIISASTSTGSAMLKSTGEMLYNPYKEYTSSHTETSINSGPNNNALSTAGNMVGASLKGFGKFTGAYFKGVVVDIPYAAAEGFRQVPRLYGEEPKQYGTVRDWKSGATMGGKNFVDGMTDGFKGLFTQPIKGAREEGALGAVKGFAKGTIGLATKVPSAGIGLVAYPFQGIAKTIEAAVRSKTGKAILLARLRDGYAMTERAHMTEDEQQYLLRRFQALTDP

SEQ ID NO: 7953 - protein, 1448 aa, Exserohilum turcica
MASQDRERERMPRGLSRRRRDSRRESRGMSLEMPERFRDGDDAEEDVTAPKRNNAVSMNQSLFSMIARAGQHSQTDLGTMQEGDSGDSDDEGKPKAPYQALDGAARLSRLSSANEFQTPAQECHETSTENGKHRRTLSENRLLRSLPKLKVSSRKEARPEGQRAQMSSSQFLPPKPSPSPSPSALPKRPSKPKDKEKDKLTAGEEIHVETAPSASRKSRHGSTTGVDKSQEPATLAKRLQQIFEFDEVEEVIAEYACWLLQSLLLQGYMYITQKHICFYAYIPKKHHDVSKTGYLYKRGRSKLNRYWFVLRGDVLAYYTNPAELYFPRNRINLQYALAAEVLESTKKGEEETTFAVTTDERRYLFKADSAASAKEWTRSIQKVIFRTHNEGNSVKISLPIQNVLEIEESSILDLANTVKVRVIDNDETFAIDEYFFSFFNKGQDALNVLRIMVNDNEHHQGTHTGGDRETTPSGHRASPADVGETPHIHENVRATLSPLPAPRARGSSISDVSARSSNELNRKSWDVRRSMDATHTLRGPGHEARKSNHEARRSFHGGPNNTQNKRHSGDGSPQSLKAADSESATLSLEPGTESSAAIQSMEESNASASQILDRSDLFRGPAYQSTDNKLDLQHKNSQDTARSPQAKTTTAAKRYKQPQTPIGTPDFEDGTDTSQANPRLSGSSSALQDIASYPLQKASGLAGFLRSRSKRMGNLLASESMGYYEKVSGMLAGGRKHYNTAEGLETGDQIHGFEDDEDAAKAVENFRDHFAFAETEVLQSSFFASLQRVLPNYGKIYISGRYFCFRSLMPTSKTKVILPMRDIENVNKEKGFRLGYHGLAIVIKGHEELFFEFSKAEFRDECAITVLRILENTKYLEDEDSSSSGIDSEDEAAKAEHDLLQQAREHTDADKQVDVSDIVRAADQDRIPLIFDDPLASFVDFKPSEPLTIVCLTIGSRGDVQPYIALCKELLKEGHKARIATHAEFEPWVRKHGIDFAVVDGNPAELMRICVEHGMFTYGFMKEANSKFRGWLDDVCSSSWRACQGADVLIESPSTMAGIHIAEALEIPYFRAFTMPWTRTRAYPHAFSVLEKKMGGGYNSLTYITFDTIFWTAISGQINKWRRRELGLQGTTQHKMQASLRPFLYNFSPHVVPPPLDWPDWVRVTGYWFLDESDLYEPPADLVAFMAKARADGKKLVYVGFGSIVIDDPAALTRTVVDSILKADVRCVLSKGWSDRLETKDASKPEIPLPAEIFQIQAAPHDWLFKQMDAAVHHGGSGTTGASLRAGIPTIIKPFFGDQFFFAQRVEDMGVGVWLKKVNTSVFSRALWEVTNSQRMIVKAKVLGQKIRKDNGTQVAIQTIYRELDRARTLIKKQAKQDDDQTDDFEEDWTIIEEGEEMDGTHPFEMQQPLAGISQDASQTGGGSLVLGSMVLKGAGVQKRASASAQRD

SEQ ID NO: 7954 - protein, 1229 aa, Phanerochaete carnosa
MASSIHTIYRPLARSRRERVPATRSKSGKLSSVSDAEDEPAPEEPVVLEEELEDDFEQTVDRFTPGPEQGMDSPRMPLSPLPELDFLESNTKSHPSRSGSMATVKLQRRARLAEKLREVFDVPGIQEVIAEMPCWLLRSILLQGYMYLTDSCLCFFAHMPSREDQVLKSGWLSKRATRTKRWIKHWFILKNDVLSWYQSSSDPYFPHGVADLRYAITCEPTGERDIRIRTNQRTIKLSADSVPSRDEWVKAIRKVMFKAQNSGDSVKIAIPYSAIVDVEKSSAMDFSETIEVKAVDKNEAYSIDSYFFAYFHDLPAALEQIRDAVRAYRSAPGGSSSPPVIDTTVSRVPQAAHQLSQSPATLPPVPQVPKSPSHFSFRFTSLLRPLQDSLPLMRGYSAPGYVSRSPENEEYTHVSRKSGSCFVPITTPPAPIQPPSLSGPRSPGLTPTSPNFGHAHTYPPSTSASFTSAPASSLTSKESSTWAVGVPTWLKTGSKKLLSSASFATSLGGLRLTVEHSASAPPATGPGVSEILSTQSHLSESSSGDFGYFSILETPETAMDEETIEKFRTAFAFDEKEKLLGCFQGYIFRLLPVYGRLYISSSYFAFRSSGPLTSRTTMILPIRDILSTQPTKAFRFGHHGLVVIVRGHEELFFEFSDELRRAAFVRLLEKQIEEVRHHAGSGDATQPTTGELDALILEEFGPRTSVLTDAEPVTEPDGMDSSLPAVMFTSTSSTFLTFKPNKSLHFTFLTIGSRGDVQPYIALAKGLMADGHRARIATHGEFKEWVESHGIEFGYVGGDPAELMRICVENGTFTVAFLREGMQKFRGWIDDLLKTSWEACQGTDVLVESPSAMGGIHIAEALRIPYFRAFTMPWSRTRAYPHAFAVPEHRMGGNYNYMTYVLFDQVFWRGTAGQVNRWRRHTLGLPSTSLDKMEPHKVPFLYNFSPVVVPQPLDWPEWIRISGYWFLDDASVSSQKWIPPPDLVEFIANAHKENKKVVYIGFGSIVVSDPKAMTRCVIDAIVQSGVYAILSKGWSDRLVKNVADAGEPPEPLPKQIYPISSIPHDWLFKRVDAACHHGGAGTTGASLRAGIPTIIKPFFGDQYFWADRVEALGVGSAVRKLTVQSLTDALITATTDQKQVQRAKEIGEQIRAENGVATAIEAIYRDLEYARSLIKGLPHEDETDLSTLRGRPTHSRSNSSPGHKSTHSSASSAHGGTISDWSVISDQED

SEQ ID NO: 7955 - protein, 1456 aa, Yarrowia lipolytica
MLSASQFLKHRVSCLPMLNKVESDSTDGDPDDACQHPHDCNIFSVLVNGATDRLEGFFDESDEEDGDEVETPSTTTTAVSPSATMSAPSPTATAPTPHSGTHTPKSPLHSISHCPSFNSVAQALPHSLSPHSLCHTSSHEASRRGSAEQPSRTQSELARRIKTENILNSFHDSLEAAYEKCHGGANPEEHQSNKTEYFQQKLKGFAALDVDEQLIADYPVWLLKNVLIQGHLYITAKHMCFLSYLPRRQNANIRSGTLVKARKRSLREGTRYWCVLKNDSFSYYPDSTDVYFPAGTIDLSEALAAELCDDEGDVTEPESFRIVMPKKSVLFKADSHSAAHEWVKALQKEIFRAHNQGDTVRIVIPLQNIVDLEKTKIFEFATTIKTSVVESNETYAIDEYIFTFFKFGDDVLRTLTENGVEISGGNFSPRQSQLAVGHKHVTESVRDSTLLHASGHHHHFFHSAHHESDGKSNSKSHTSSRSHTPRNLTPQVTGEQPHERDEKRDSKLPRLPKFLRRFKDKVDDKCDDKPTLVPSFLKSRASSRRNSAEGSDRPNLASQRTSSSTLFPSAPPTPGSQPTTPGVHAPGSSTPGGSYGTTTPGTPASADSVSLAGTPGVAAPVGDIEGLNGNPMPAGIAAELKEKRKSGGATSSGAATGATTPGGAAAPGSTGNSSPGTPGGLGGPGAVGAGGPGVMGGAESAPAGTVPQQSHHAGISVVAPHDPAAAAAAADAAAPFTRGPGSGIPEIQDDSDSSDDDHWGHIGTAEVDEDPEQDTFKKKNKRFSTLSKVSDLWSGSTKHYGKHHTERLGDDDDKHLASAEEITESNERFQKRFALGTEERLIASYHCHLHRGGIPTYGKMYVSTNYVTFRSFLRTKTLMIVPLKVVENATKDSGFKFGYSGLVLTIQGYEEIFFEFASASHRDDAEVMLLRQLDIIRPHINDDIKSDDQYMLQSARLCTYEDALKAEANVEMPPVIIDGNLASVLPGLVTPQSKMLFTLLTIGSRGDVQPYISLGKALIEEGHRVRIATHSEFKDWIEGYGIEFKEVAGDPSELMKIMVDHGVFSVSFLRDAASKFRGWINELLASSWEACQGSDVLIESPSAMAGIHIAEALQIPYFRAFTMPWSRTRAYPHAFIVPDQKMGGSYNYLTYVMFDNVFWKGISGQVNRWRKKTLHLPRTNLDHMEQNKVPFLYNVSPAVLPPPVDFPDWIKITGYWFLDEGSKDYTPDDKLCRFMEKARNDGKKLVYIGFGSIVVSDPTALTKSVVESVLKADVRCILNKGWSDRLGKKDAKEPEIPLPEEVLQITNCPHDWLFPQIDACVHHGGSGTTGAGLRAGLPTIIKPFFGDQFFYANRVEDLGAGIHLRKLNVSQFSKALWEATHNERIIAKAAAVGRQIRSENGVISAIQAIYRDLDYARSLVQKKRGYTPTSDKEEETWTLVDDIERQMQDEVEKHNL

SEQ ID NO: 7956 - protein, 1134 aa, Fomitopsis pinicola
MGTVKLQRRSRLAEKLRDVFELQGIHEVVAEMPCWLLRSILLQGYMYLTDSYLCFFAHMPAKEDQVLKSGWLSKRAQRTKRWIRHWFILKNDALSWYQSPADPYFPHGIVDLRYAVSCEPLYEKEIRLRTNQKTIRLSADSAPNRDEWVKAIRRVMFRAQNMGDSVKIAIPYTSIADVDKSSAIDFSETIEVKVMDKDHSSSTDSYFFAYFRDLPGALEQIRDAVRASRGIPVDSDAHFVIDTTVSKPLALPPVASRTQSAPVADQLPKSPSGFKIPSLLRPLQESLPRVRSATPVGQTMPTAEGDDGEEYTHVAKRNSSTFMAVTTSPTGSVSPREPGSPPPEGRFSSPPRPALHTYPPSPSSSYKMADIVPSSSRDSGSWTVGVPSWLRMPSIPSMPSRRTFTNVLGGIRTGEPQSIIEGGSVSEVLSSNAGGGGRTSGGSGCTNDFGYFSILETPATTLDDESIEKFRSSFAFDEKETLLGVFPGYIYRLLPVYGRLYISTNVFCFKSSGPLTTRTRMILPIRDILSTEVSKAFHFGHYGLVIVVRGHEELFFEFNDEERRDAFVSLLERQIEDQRRRSSDPEASSTTEPHNTLILDEAGPRPATQIDVRKVVHEAAMSESLPAVMFNSTSSTFLTFKPDKSLHFTFLTIGSRGDVQPYIALAKGLMKDGHRCRIATHGEFKAWIEAHGIEFGYVGGDPAELMRICVENGTFTVAFLKEGMLKFRGWIDDLLKTSWDACQGTDVLVESPSAMSGYHIAEALGIPYFRAFTMTWTRTRAYPHAFAVPEHKMGGNYNYMSYVLFDQVFWRATAGQINRWRRNTLGLGGTSLDKMEPHKIPFLYNFSPVIVPPPLDWPEWIHVTGYWFLDDADVSSKKWSPPQDLIDFLDSARKAQKKVVYIGFGSIVVSDPKSMTRCVIEAIVRSGVYAILSKGWSDRLVKDATEVSDPEEPLPKQIYPIASVPHDWLFKRVDAACHHGGAGTTGASLRGGIPTIIKPFFGDQFFWADRVEALGIGTAVRKLTVESLTQALITATTDQKQITRARYVGEKIRAEDGVETAIEAIYRDLEYARSLVKDPVAGDLHEDTPDAEHATIRESRQPLSPEPSGARSASSSVSSAHDAPSDWSVISDQE

SEQ ID NO: 7957 - protein, 1581 aa, Melanopsichium pennsylvanicum
MSIASPNSPPRPFSSSRDEHRSPSTNDTQPSAANLDPFVTDDPDDEPHIPTQVTDQYGTPPFPTSPRLDPSSPRNFSTISSLAGSRELGRPVLEPITQIFTASPSVPALQSGASMSLLPDDTLADETAPDGMEVAPTDVTFHAKPQGLMQMLSLVGSTFFEADREGFTEDEAEELDRQLAPTNRAERGRECPESAPMIEGQQQPQDLRRYSFDPTSAFSAKGRLQALARDDGSDDGFTPQGGRSPLDASVLTIGPSRPERSSLAQSDILGLSRDPTATKGGRRPSNLRSQLHNVESASTYASTSRLGDPTDARQTPSSPLQEDSIDSPGLPSACQGSKGHRSTAHLLSQRRLDPLLIRPYPDPHPSGEAQADKSELDRDRLIVQLKEVFQLDAAEILLLAQPCWLFRSLLLQGHLYLTSGHVCFYAYLPSRDEKVIKTGMLGKRTRRTHRFSKHWASLKGGKLSWFDSDRDPYFPQGHIDLRKVSAIEPSQNHKERFKVTTPARRFTFLAEDEHSRDAWIVALQKQTFRAQNQGDSVRISIPLETIMNVETTLSVDGTEMVCITVVDEAGDFSIDEYYFLHLTKPSAFISSLNSVLDGAARGSGSSPQSAEQDLNFSRLSIRDSTGAAHASALSRKSLEEVPTLSQVHVSARAPDGDAGANMCTGKPLGVAPSTAAQEKQLKSDEIQDGPQALGPTTATAIAVPTSIRRKPQDAPTEAVLSTTPRAAMLNRLSMESAHTYPPSPSISDPSSSFDQVQREAERGWAIPNWLKSAPAKVLGRAADGSSSAPQGKTTANVTSCKRRRKVVERWSDDKTDSASREASSATDTEDDLLSQSIHSARSNYSMLDANEAEDEQVDNTNVAAEFRDTFGIFEEEGLIGHTHAYLYRVLPVAGRFFVSEHHLAFRSSGIAAKTVGRTLMLVPLQDVISAAKHVAFRPGHHGMVINISGHEELFLEISSGHRRDELLSLIEYQLELERGGRGSRASREAVTRERSNALVLRDLSERITDGPATASLTSSADSTMLSPIQSGLRNSGSLSQLGDGSHILSFAPATPLTFTMLTIGSRGDVQPYIALAKALQADGHRVRIATHAEFGDWIMGHDIEFSEIGGDPAELMRICVENGTFTVSFLREGVTRFRDWLDDLLASAWRACQGSDVIIECPSAIAGIHVAEALQVPYFRAFTMPWTRTRAYPHAFAVPNKKAGGNYNYMSYVIFDQMFWRASSFQINRWRKNLLALKPTSFDKLEQHKVPFIYNFSPSLVPRPLDWFEWIHVTGFWFLDNPDNSSSKKWEPPADLVAFIQGARERSRKLVYIGWGSIVVPDAETMTRCVLQAVQKAGVCAILSKGWSDRLSSDPKKGTASLDPSLVQDVFQVSSVPHDWLFPQIDAACHHGGAGTLGASLRAGLPTVVKPYFGDQFFWGQQIESLGVGSCVRRLTADNLAEALVKATSNVKQIEKARKLGEQIRGEDGLGNAVKAIYRDLDYARSLVKRNTRLVTESSAPNAARETVIGTEADKTAAGAVGNEEAKPGVETKTTKQQLGSSDLSPIEDGEDGGISDEWSDIGGGPLSPSREEHNASLVFS

SEQ ID NO: 7958 - protein, 255 aa, Thalassiosira pseudonana
MPVVESDNRKESSAGFGGQDTLNTLKSFLSSGSKPIYLGFGSMFSKTPEYMTLWTVRALRHSGQRGIILGGWAKMSSRFLQDAEPELVQYAKDNILFVPNAPHEWLFPQVSLIVHHGGAGTTHASLRAGVPVIITPVLGDQFDNSKLVNALKVGYGFSQQLQRIHWQELGDAITRVLADEGNARRVAKVGCMLQMQNGADGAADEVLHFWNDFVLTGIFSQLFPGDVAKKTKTNFSSIASAVVLVVFAVSAIALV

SEQ ID NO: 7959 - protein, 428 aa, Haliangium ochraceum
MARILIMTYGTRGDIEPFLALALGLKDAGHDVTLATAEQFGDWVSDFGIDYAPITNASLDVIHSEDGKTMLEGGAGLFARIAAGARLARQSRAINEQLCRDAWRAAEATRPELILYHPKIMAAPHIAEKLAIPAILAALQPMLVPTAAFPVTGLPRLPVPGYNRFSYRFVNLSYGALKGSVNRFRRELLGLAPVRRAAEVLRPPSARASKVLHGLSPQVIPRPDDWPNYAIMSGYWPLPPDPAFTPPDELLRFLDAGPPPVYVGFGSMVSKDPEALAELVVEALRLAGVRGVLGAGWAGLAADADGVVAVRDIPYGWLFPQMAAVVHHGGAGTTAAGFRAGVPSVICPFFGDQPGWAAASVALGVGAPPVPRKRLSAERLAASIRVATSDQTLKRNAKRLAAALDAEDGIAVAIAEIEDTLQQAASAS

SEQ ID NO: 7960 - protein, 1476 aa, Hericium alpestre
MSRLAKSQIIPSRQPTACASPAGRSSQDESHNDADKSPSTSPRSKIVKRVMERTSEKLGRSKSTEAKSSDMSKSESFAGHRPILSRSRKGKDKQDGFEARNGDEIAGPQHRAQESPARSTPLSEPNDESPFIRPPSPSQHPRRPSLNRFGLETSMRAGTQTLIQALQALPWAEDQDNEDEAINHGNLSPAESDSDDEVKQSRGLSSSIHTIYRPVARSRRAESSFRLPPVRDEAETHPNPEDIAEAAQRAGFAMSDEEIEDDDFEVATPGLSSSPIRQSPTQEEEGDAALTPVMQSVAFRVHPERTGSLATVKTVRLDRRARLAEKLADIFDLSGINEVISEMPCWLLRSILLQGYIYLTNSYLCFFAHMPAREDQVLKSGSMYKKAQRTKRWIRHWFILKNDVLSWYQSSSDPYFPHGVVDLRYAITCDAANEKDIRLRTNNKTIHLSAESLPSRDEWIKAIRKVIFKAQNMGDCVKIAIPYSAIVDVDRSHAMDFSETVEVKVVDGDDQLSIDSYFFAYFHDLPAALEQIRDAVAAARNFISSPNHPQALRIDTTVPHSASVPRLGSSSRLPSVPESTPSRLPTFRLSTLLRPFSDSLPIGRSTSAPEPIEDSNEEFTHVQKRADSSFVPITTSPRSMDASVFDSLSPPSSVTGLPPTDSPEGPGNEESTPTNTKVGYTYPPSTSLQETSLAASRESSSWNVGVPSWLKAASSRRILGVSPSAPAGLNQSATAATDGRGVTEIYSSTLSTSTGKSSNGGNELGYSILEAPGVSMDEEATDKFKAAFAFDDKEKLLGYFPGYLFRLLPVYGRLYISTNYLSFKSSTPLAGKTRMILPLRDLLAVEISKAFRFGHYGLVIIIKGHEELFFEFNQDDRRAAFRLLLDQQLENVRKRQANGETTGQSKGQLAHGFGAAVMFTSTSSTFLTFKPKESLHFTFLTIGSRGDVQPYIALAKGLMADGHRVRIATHGEFQNWVESHGIEFGYVGGDPAELMRICVENGTFTVAFLREGMQKFRGWIDDLLKTSWEACQNTDVLVESPSAMAGYHIAEALRIPYFKAFTMVWSRTRAYPHAFAVPERKMGGSYNYMTYVMFDQIFWRGTAGQINRWRRNTLRLPSTSLDKMEPHKIPFLYNFSPIVVPPPLDWPEWIRVTGYWFLDDADVSAQKWTPPPDLLQFIDNARQLGKKVVYIGFGSIVVSDPKGMTRCVIDAIVRSGVHAILSKGWSDRLTKNVAEASQLEEALPEQIYQISSIPHDWLFRRVDAACHHGGAGTTGASLRAGIPTIIKPFFGDQFFWADRVEALGIGTGVRKLTVESLSDALVSATTDIKQIDRAKMVGENIRAENGVAIAIEAIYRDMDYARSLIKAKRAVDDLSEAEDATIRDNDKRMSSSSRADIRSGDSSAGGAPSEDWSVVSDQDEPSSASRSVSRRASDARQSWRRSGLTAAMLSVLPDALTTGHRRSRSASSLSASNSNA

SEQ ID NO: 7961 - protein, 427 aa, Cyanothece sp.
MRITILTTGSRGDVQPLIALGQGLKQAGYRVKIATHDTFQVMVQHHGLEFAAIAGDVQALMASEAGQQMLKSKNPIYLIQQYARMVKPLVIQAMMDSWAACQDSDAIIFTATAVWGYDIAEAFGIPCFFASLMPQTANPDFPYPSVSPDLQLGRVLNQWSYPLLMEAFGTVFRQPLNQFRRSQLQLPPIAFGTIYRRIERTSTPVLYGYSPIVVPKPQNWSDHHHVTGYWFLESTTDWQASQALLDFLTAGSPPVYIGFGSMGGGDATQTQMILDALKQTGQRGILLTGWGGIAQTNLPDDVLLLNSVPHSWLFPKMAAIVHHGGAGTTAAALRAGVPSVVVPFFGDQPFWGDRVMKLGTSPSPIPKAQLTTERLAAAMTTMVTNPVMQQQAKAVGATIRAENGVQQAISVIERDLATSKYRFAQCV

SEQ ID NO: 7962 - protein, 1496 aa, Leucoagaricus sp.
MSHHSSFQPLFHDPATAPEGDTSPQALGMPLSHSLSDDPKDPHTPSRVKRISNAVEKTVDRLSKSVSAKMPHPPATQSPSPSSHRRIFSLSRRSKGQQPDSGSASSSATPSASRLLSVQPTLSNSTVTPNDDCPFVRPPSPPVRPSLSSFRGEGSMRMGTQTLIQALQALPWIDPDNDDEGSGQEQDTTGSESEDDENQRVDRLASSIHAIHRPLARSRRRDIPRYNRQDDSQPVAEEPETYLSDEDVEQDFEEPKSPETRPPLTQHSQSLPPLGNHNITSSAVVPFKYANIRTGSMATIRLQRRARLAEKLRDVFELEGIKEVLAEMPCWLLRSVLLQGYMYLTNSYLCFFAHMPSREDQILKSGSLNKRAQRTKRWVKHWFVLKNDALSWYQSSSDPYFPHGIIDLRYAISCEPVGEREFRLRTSQKTVVISADSVPSREEWVKAIRKVIFKAQNMGDTVKIAIPYSAILEVERSSAMDFSETIEVKVFDKEGNYSVDSYFFAYFHNLSAALEQIRDAVRNVRSLPDQEQAQVLDTTVARPSIATPIPERPNTTPDVGATKSSFSSFRISSLLRPISETISLARSSGTTPTSELSIKSEDFTHITRQTNSFVPVTESPKPIEPPPSGTSSPPTLEDSQATTTPQQQQQQAPTAPDHTYPPSTSRQSVVPDLPSFRSSSWGVGVPSWLKTRRYFGSAISPPQSPSANAAVKEVYSPQLASSSSGPVSKTSGGGSGWGDMAFSILETPNVPVDADMTEKFRAAFAYDEKETLLGYFPGYIFRLLPVFGRLYISTNYFCFKSSGPLTARTRMTLPIRDILAVQKSRATRFGHHGLVVIVKGHEELFFEFGAEDKRDSFILLLERQMDDVRRRFATGETNSDNSPGKCEALILEEFERKDSTSSMELASTSTAATGPNVPENMTDSLPAVMFTSASSTFLTFKPSKPLHFTFLTIGSRGDVQPYIALAEGLIADGHKCRIATHGEFKEWIESHGIEFGFVGGDPAELLRICVENGTFTVSFLKEGLQKFRGWVDDLLKTSWEACQGTDVLVESPSAMGGYHIAEALAIPYFRAFTMTWTRTRAYPHAFAVPEHKMGGSYNYMSYVMFDQVFWRATSGQINRWRRNILHLPPTSLDRMEPYKIPFLYNFSPHIVPPPLDWPEWIRVTGYWFLDEADVSAKRWTPPEDLVQFIDTAHHNGKKVVYIGFGSIVVSDPKAMTKCVIEAVIQSGVYAILSKGWSDRLHVKVGDTSEPEEPLPPQIYAIQSIPHDWLFRRIDAACHHGGAGTTGASLRAGIPTIIRPFFGDQFFWADRVEALGVGSGVRKLTVASLTEALITATHDQKQADRARLIGEQIRSENGVATAIESIYRDLEYARSLIKHTAVVDPEEDADNEHSTIRNRDASLPNNFSPGSYSGYSSSGSVRGAPSEDWSVISDQEDQERESRSLESFRTSEGKGTKDSPAKRADFAHSPVLRVNDLAMYLRLLMPPFNLTCFALTS

SEQ ID NO: 7963 - protein, 1564 aa, Pyricularia grisea
MASSTSDQKPEPGLNVPLRSPAPDTASPPLVSPHLPRRASSHHNRNPPTSVLSPNSEKPSRQSEDDPKKRIRKLQKKRHNGAHSPTMEIPERLRESDPEDEDDDTRRPPFTMNQSIFGLIAAAGSAVDFNDRFEGASSDEDDDGADGDHELPFPRDRRRNMAQTAILRRSRAPDESLEVEKKRRKGSGHKLLRSLPQISLPKRLSSLSKKSKSTKSKEPQINEEEEAEESQPSPENSSPTIESSRNDGRLPPVMSRILEARAELSLSRPSLDLDRIYGSNSPTAEGGPSALAIKLKEIFEFDQVEAVMDEYPCWLLQSVLLQGYLYITSNHICFYAYLPKKANEVVKSGYLSKSGKRNPKYNRYWFRLKGDVLAYYRDPSNLYFPSGQIDLRYGISATVTDKDKDGLNFTVVTHQRSYHFRADSAPSAGEWVKSLQRVIFRSHNEGDSVKISLPIRNVMDVEEMQVVQFAETCKIRVIDNDETYAIDEYFFSFFSFGKEAINVIKAMVDQRQDGQNNDSRGSDDDSPYVEPPSKSSSISGGRDRPPKLSKINDNVRATLAPMSPTSPTNPSPRASGDFSRSSFDALRNFGRRSLDLDSAVRDESQVRRSFSGHRHARSRSRPRLSEHEPIPEKHGSSDSYIQSSTEDPSLASISGMIVSGSEDQSASQILKGSDVFHSPTIRRDGSGSRKGDNDDKSSDKLTSKARPQAGNGHSPDFKISDKPSRHSEGQANTMVSLPARGAGALAGYLNRPLSPFRRMSNLLATESMGYVEKVSGMWKGGHRHYDEAAALKTDDELAEDEDEEKVATSRERFRQHFALPESEKLVATYFGHMIRVLPLYGKIYISDRSFCFRSLLPGTRTKLILPLKDVENGHKEKGFRFGYSGLVVVIKGHEELFFEFGQAEVRDDCAITLLQQLESTRYLQESGMLGQDEKEDAENAVAERDALQSARQEERPTHEIPLPKQTSVVSDAPTILFDDPKASFLNFKPPNPLRITCLTIGSRGDVQPYIALAKGLLREGHEVRIATHAEFEPWIRSHGIDFRKVEGDPGELMQLCIENGTFTWQFLKVAASKFRGWLDELLSSCWQACQGSDLLIESPSAMAGIHIAEALQIPYFRAFTMPWTRTRAYPHAFVMPEHKMGGAYNYVTYVMFDNMFWKMTAQQINRWRNVELGIPNTSLEKMQPNKVPFLYNFSPYVVPPPLDYSDWIRVTGYWFLDEGTPRKAAAEIEAGDESEEKPTDQKDGDKNVASGSNWTPPPELADFIEKARADKKKLVYVGFGSIIVNDPVKLTQEVIDAVIKSDVRCILSKGWSDRMSTGSNATDPKPSQDGEQAETDQQQPVEKKEEPKLPDEILQIKSAPHDWLFAQVDAVAHHGGSGTTGASLRAGVPTIIRPFFGDQFFFGSRVEDLGVGICVRKWGTNAFARALWEATNSERMIVKARVLGEQIRKENGVETAIQCIYRDMEYAKSLIKAKANKNTKQQPSKHEGQAGEVHDDEGSDDDTEEWTFVGGNDPGEGGAEFPDAAYRRQESAKSGDAAVGLGLGIGASSSGGGKALGSKVLSGA

SEQ ID NO: 7964 - protein, 1486 aa, Fonsecaea multimorphosa
MSNLESPPSKKSGLRKLHIRNLNRLPSSHIPSRLRLGDDAQEDVTAPNRGSNMPAQYMNQSIFSMIAAAGSRTDFNTRFDESSDSEDEISEEQEQTAGDKGSLPVAPETGSSETQSVATKDEKSTGEKKSKRLSSQRLVQSLPRLSGRSLRKKEDTPRKDPSPESDDTSESSRSNPRDAPVLSRLITAEAQFQESAEGQDQMLESPTAMRSRSRGESTPQTLLATRLMEIFGFEVPEPVVAEYPCWLLQSVLLQGYLYITKQHICFYAYLPKKSHTVVKTGNLSKKGRTTSKYKRYWFSLKGDVLSYYSDASNLYFPSGNIDLRYGISANLSIDKEKGKSKECKDFSVTTDHRTYHFRADTASSAKEWVQTLQKTIFRSHNDGDSVKISLPVENIIDFEESPVVEFAETVKIRVIESEDSYAIDEYFFSFFSFGQDALNVLGSLITEAPARRTSEDVLSPTRKVEPLSSPRPRATSNQHSSDVIPGSPRAQSSPPLKDSVRATLLPFSVGNDGRMSPRMSGEFPRGNSPSRSSHEFAGEYGRASFDRGRRSGSTSRLEATNSKRTTRSPLARHDASEDSYVQSIDKETDSSTAPLSPRAEAQMSASQILTRSDVFHQPAIHRMETLASMSTEPTRSDVGTILSSSPQRGDTHPIPIRSAHEPPTDRRATVANEFLSAELEPGKNYVRNSSSPTLQDLVKAGSYPLQRAGAFADYLKSRSSSMRKLLATESMSYLEKVSGMWAGSRKHYGENEGVVPDDRGIDPEDEEANVGHGDRFRAHFALPATEKLQATYFGFLHRVLPLYGKIYISNRKFCFRSLLPGTRTKLVLPLKDIENVDKEKGFRFGYHGLVLVIRGHEELFFEFSSGEHRDDCTVTLLHSLETARYMAESGVLAKADEDDAEIAKEEHRRLQEARRTSTAGDHALVLPDTTEAIYSHKDEEPSGPVLFDEPRASIINLSKPSASLRITCLTIGSRGDVQPYIALCKGLLAEGHRPRIATHVEFGPWIQKHGIDFRPVDGDPAELMRICVENGMFTYSFLREASAKFRTWIDELLTSAWAACQESDLLIESPSAMAGIHIAEALGIPYFRAFTMPWTRTRAYPHAFAVPEHKIGGAYNYYSYVMFDNVFWKAIAGQVNRWRKKELGLRSTNLDKMQPNKVPFLYNFSPHVVAPPLDYSDWVRVTGYWFLDEASDWTPPTELTDFIKKARDDKKKLVYIGFGSIVVSDPAALTKTVVDSVLKADVRCILSKGWSDRLGDPQAVKAEVPLPPDIFQIKSAPHDWLFRQIDAACHHGGAGTTGASLRAGLPTVVKPFFGDQFFFGSRVEDLGVGICLKKVNVSLFSRALWEAAHSERMIVKARLLGEQIRQENGVQTAIHAIYRDLEYARSLVKARAAIQQQGAAAAAGGATGLTAIDLLDEGGDIEESWTFIGDESDPNIQRRLQEWDTTAAGTGGHSPMRGRAPRVSLDRAKLGAMQGVEPVRKASVKR

SEQ ID NO: 7965 - protein, 1449 aa, Byssochlamys spectabilis
MQRLDVEDSIKKRMGRRLSFRSRSIHRMPSHQVPDRFKDGDDAQDDFTAPPKGIGGREYMHQSIFSMIAAAGSKTDFHGRFDDPSDSDGEGEGIAEESSTSKGDKGRDAKSPTKKRETENTPSSKDSVKKDLLEDRGRIHRRKLSDHRLLRSVPKLQSRHTKGKESVGKNELGACDELLPASPPRRPRSLTPRAAPVLSRMIEAEARFGDPPSHRQETQKAAEDRSPTRQRADSAPSSLLSTRLMEIFGFDKPEKVMGEYACWLLQSVMLQGYMYITEGHVCFYAYLPKKSNTTVKSGYLSKRGRQNPKYNRYWCSLKGDVLSYYADPSNLYFPSGHVDLRYGISAALIEQKDKGKDVKDFTVTTDQRTYYFRADSAPSAKEWVRTLQKVIFRSHNEGDSVKISLPIENVIDIEENPMIEFAETVKVRVVESGDTYAIDEYFFSFFNFGKDAFNVLKDLVKNTATQTNSQGLPDATSGDASVERPQGQTLDAPFHSPRSGRSSPRFNEPVKSTLLSRSPDAGKGHLRSKSMESADPLSPARAYLDRSPPDNKASSDSFVHSIEQGTESSAVLQSITGTAESASQILNRSDVFQSPTINRLRVPSDADATGRRRSDETARSASARAKARAGTGVNKEDQEVREAASDSENEVNSRSRYSTSAPTLQELVKAGTYPLQRAAGLAGYLKNRSKRMSTLLATESMGYIEKVSGMWAGGRRHYGEGEGILPDDQLVDPEDEERGCGHGDRFRAHFALPPTEKLQATYFGYLHRLLPLYGKVYISNRKFCFRSLLPGTRTKMILPLRDIENVEKEKGFRFGYHGLVIIIRGHEELFFEFNASDVRDDCAVTLHQSLESIKFLAESGILAQEDKEEAEAAKAEHQMLQEARLDVSADNEEGSRALSPPESPEVHPIFDDPRASIINFKPTESLRITCLTIGSRGDVQPYIALCKGLLAEGHRPRIATHAEFGPWVRKHGIDFAPIDGDPAELMRICVENGMFTYSFLKEASLKFRGWIDDLLSSAWASCQDSDLLIESPSAMAGIHIAEALRIPYFRAFTMPWSRTRAYPHAFAVPEHKMGGAYNYITYVMFDNVFWKAIAGQVNRWRKNELGLRGTNLDKMQPNKVPFLYNFSPSVVPPPLDFPDWIRVTGYWFLNEGDDWQAPRELTSFIQRARADGKKLVYIGFGSIVVSDPAALTRTVVESVQKADVRCVLSKGWSDRLGDPASAKSEIPLPPEIHQIQSAPHDWLFSQMDAVAHHGGAGTTGASLRAGVPTIVKPFFGDQFFFGTRIEDLGVGICMKKLNVSVFSRALWEATHSERMIVKAKMLGEQIRSEDGVSTAIQAIYRDLEYAKTLARQRSIASATPFSPVAKKEEITEPPLDDDVADSEEWTFVGDDTDIDISKRMRDREDADIDLPPPALCSHGSSSPARTVQSVLDASDASIGWKRDDMRAQA

SEQ ID NO: 7966 - protein, 1482 aa, Piloderma croceum
MSDHDSLKPVVHDYALTNQPSQPAVPMMKHADQDEEADGSSSPRKRITRAVGKSVDNLTRSLSGRSTPQQRQTAASPPRRLFSLNRKGKPKELINESLSPDSDNSNAQGRYVSPSPSSRPTSPIISGASDDSPFIRPQSPSAPAYPIRPSLQAFRGDGSMRAGTQTLIQALQAIPWAEDSDNDEEVMPQRLSTALESDSSDEEDTLGHLASSIHTIHRPVARSRRADAPPSPALGLQAPSMGIHGEVASESESEENLVSEELEAEDFERTPRPSGSVPDYVQELSSSPVGTPGGSNDLPRRTTMARSGSMATVRLQRRAKLAEKLKDVFELKDIDEVWAEMPCWLLRSVLLQGYMYLTNSYLCFFAHMPTREDQILKSGSLNKKAQRTKRWIKHWFVLKNDALSWYQSSSDPYFPHGIVDLRYAISCDPVNEKGIRLRTNQKTISLSADSVPSRGEWVKAIRRVIFKTQNMGDSVKIAIPYSAVLDVEKSAAMDFSETIEVKVVDKEEAFSVDSYFFAYFHDLPDALDQIRDAVRASRVLPPLSSPQAVLDTTAARPPLAPVIPMDRAQSLPAVDLASKTTSGFRLTSLLRPFHDNARPMSSPSPEHLDQGEDFTHISKRSGASFVPFTSSPKSQEARLPSSEPRPLVGASASNLTPTPSNIEHTYPPSTPTNDLPSMSWNVGVPSWLKGSSRRVLGSSSSAGITYSTPLVASTSLGGVSEVYSSTTLSSSTTRSRCAPSELGYSVLETPEIAIDQEMTDKFRTVFAFDDKEVLLGYFSGYIYSLLPVYGRLFISTNYFCFKSSGPLTSRTRMMLPIRDILAVENTRATRFGHHGLIVIIKGHEELFFEFGLEDRRSAFVTLLERQMEVVQRPQVASEVPILSPGKRDALLLEEFEAKTSDSTDADPRPAPDGMTDSLPAIMFTSASSTFLTFKPKESLHFTFLTIGSRGDVQPYIALAKALLADGHRVKIATHGEFKEWIEAHGIEYGYVGGDPAELMRICVENGTFTLAFMKEGLLKFRGWLDDLLATSWEACQGTDVLIESPSAMGGYHIAEALGIPYFRAFTMTWSRTRAYPHAFAVPERKMGGSYNYMSYVMFDQVFWRATSGQINRWRRNVLHLASTSLDKMEPHKIPFLYNFSPIVVPPPLDWPEWIRITGYWFLDDADVGSKKWTPPSDLEIFIDSAHKVGKKVVYIGFGSIVVSDPKAMTRTIVEAIVHSGVHAVLSKGWSDRLQVKPNGEVAEPEEPLPPQIFRISSVPHDWLFRRIDAACHHGGAGTTGASLRAGIPTIIKPFFGDQFFWADRVEALGVGSGVRKLTVESLTDALRAATTDIKQIDRAKLIGEQIRAENGPATAAEAIYRDLEYARSLIKRAIHDDLLEDVIVDEDATIRDYERRPSSSHSGYSSSGSGPGASSEDWSVVSDQEDRRSSMGSRRSRSDGPVDRPSTFKRNSLAAAVMSVLPDALHAVPSHRRTGSVTSSTP

SEQ ID NO: 7967 - protein, 1133 aa, Pseudogymnoascus sp.
WVKALQKIIFRSHNDGDSVKISLPIENVIDVEDSPVIEFAETCKIRVIDNDETYAIDEYFFSFFSFGKQALTVLRTLVPVIEFAETCKIRVIDNDETYAIDEYFFSFFSFGKQALTVLRTLVSDSAAKQIPEDLLVQPQGNSGGNSPKPQGNSGGNSPKVSSCRPSLTISTRESKPHPNPAKATTSGLEESVKATLSPMMSSPLHVHSPRASGEFSRTSFDINQRSSSQTRASRRSMDVSRLNLDGNGRNGSPSNDRRSFSRNRAPEKRNSEKQDSSDSYVHSMEESSAAAQSASEDATGSASQILRGSEGFFQPTIHRSASASRRRDDYQLPGGPLLPPTVPHHAATMDVFERPKLIQGDNASTPSLQTLAKAGAYPLQRAAGFANYLNRHSKRMSNLLATESMGYVEKVSGMWKGGKKHYDEPLSQGLEDDTDDEGGQSDGAENRFQSHFALPAGEKLQAAYFGYFHRVLPLYGKIYISNRSFCFRSLLPGSRTKLILPLKDIENVDKEKGFRFGYSGLVVVVKGHEELFFEFGQPDTRDDCCVTLLQNLETIRYLKESGLLTQEEEESAAWAVAEHKALQEARHESRQHGHDLELPTTAEGASTDTAPIMFDDPRASILNFKPTESLRITCLTIGSRGDVQPYIALCKGFIAEGHRPKIATHVEFKDWIEGHGIEFAPVGGDPAELMRICVENGMFTYSFLKEASTNFRGWIDDLLSSSWLACQNSDVLIESPSAMAGIHIAEALGIPYFRAFTMPWTRTRAYPHAFAVPEHKMGGAYNYITYVMFENVFWKAIAGQINRWRKKELSLPRTSLEKMQPNKVPFLYNFSPSVVVPPLDYSDWIRVTGYWFLDEGTDYTPPKELSDFIAKARADGKKLVYIGFGSIVVSDSAALTKTVVNSVLKADVRCILSKGWSDRLDKVGATEPEVPLPEDILQIKSAPHDWLFTQVDAVTHHGGSGTTGASLRAGKPTIIKPFFGDQFFYGSRVEDLGVGIYLRKLNVSVFARALWEATHSERIIAKAKLLGEQIRSENGVDTAIQCIYRDMEYANSLIKRKSGSHEGLAEDIEESWTFIGDDNDPELMSRIHAWDPRVVLAHSRDMSEPHLKDVAESPVPTPRSETPLPSDKEAGSK

SEQ ID NO: 7968 - protein, 1432 aa, Glarea lozoyensis
MASEGDNKKRVTRKLTKKRKEGHQVTMEIPERFRDGDDAEEDHTTLAGGNAYMNQSVFGMIAAAGSQVDFNARFDTQSSDEEEDSTEQPSQESTGSNLHVEKTRQDKTAKPDKHRRKFSENRLLRSLPRLGTKSKSKIKSSSPHSPSSPAHESPSDLVTPSIQLPRTASRDAPVMSRMLNAKAELSMRPSFDMPRSDTEGEDNGQVRSSSLAKRLMEIFNFDKPEDVIEEYPCWLLKSVLLQGYMYITTKHICFYAYLPKKSNEVVKSGYLSKSGKRNPKYNRYWFRLKGDVLSYYSDPSELYFPAGNIDLRYGITANVADKSSGKDAAHFTVVTHQRVFNFKADSIPSAKEWVKSLQKIIFRSHNDGDSVKISLPIENIMDIEDSQIVDFADTCKIRVIDNDETFAIDEYFFSFFSFGKEALNVLRILVEDTTAKQIPEDLLSPALPKDERASPRGSTSRRSSANLLREGRPSMTLAIPPETPVLEESVRATLSPIGVVQSPRASVDISRASSDAYRRSMDLTKFGRRSVDLSRMTMDSGGRRSMSASRRSFSRNRLPSEKQGSSDSYVHSLEEHGSSAAIPSASDDTQASASQILRGSDVFLSPTIQRSSSASQRRDVDSQRKVPLTHSPTRSNTMNRRPRPEHALTTGSLIGPSSQQSDQNASGPSLQNLVKAGAYPLQRAAGFAGYLNRHSKRMSTLLATESMGYVEKVSGMWKGGKKHYDEPEGLIADGEPHVEGNDEQAAISGDRFRDHFALPETEKLQAAYFGYLHRVLPLYGKIYISDRSFCFRSLLPGTRTKLILPLKDIENVDKEKGFRFGYSGLVVVIRGHEEIFFEFSQPDIRDDCAITLLQNLEGMKFLQESGLLSMEEKESAQNASAEHKALQKARLEENPSHELKLPQSAEESKSEAPPIMFDDPRASILNFKPTESLRITCLTIGSRGDVQPYIALCKGLMAEGHKPKIATHIEFKDWVESHGIAFEPVAGDPAELMRICVEYGMFTYSFLREASSKFRGWIDGLLSTSWKACQGSDVLIESPSAMAGIHIAEALEIPYFRAFTMPWTRTRAYPHAFAVPEYKLGGSYNYMTYVMFDNVFWKSIAGQVNRWRKNELGLQSTSLEKMQPNKVPFLYNFSPSVVPPPLDFSDWIRVTGYWFLDEGGQDFQPDKDLMDFIAKARSDGKKLVYIGFGSIVVQDSAALTRTVVDSVVKADVRCILSKGWSDRLEKKDANKIEVKLPVEIYPIKQVPHDWLFSQIDAAVHHGGAGTTGASLRAGIPTIIRPFFGDQYFFGSRVEDMGVGIAVKKINVSVFARALWEATNSERMIIKARVLGETIRSENGVNTAIQSIYRDMEYAKSLIKSRKGKPSDDNIEDSEESWTFIGDENDPELVKRIHNWDSVAQLGTLNRKNEGLAGSDESGSKTDTEIMMESTST

SEQ ID NO: 7969 - protein, 1749 aa, Grosmannia clavigera
MPPPTSSTPDPSSRAALSPASPASPASPASPASPASPPPKLSATTLTTPAVASFDRRLHHRRNASSSTTPASSPAVAAAVSVFRSRHSEDDAVHHGLSKMLQKRRRDGHQHMSTMDFPERLKVATDGAEDEEVLRPNGQSNGVFMNLNQSIFGLIAAAGSTVNFNNRFEGQSSDEGDDEDDEDTDKNEADDNSRSPALDGTSESQRAAWLARKRHDGDSSADRTDKKDKRRSKDLSQSNLFSRISGGSSNVSLADKPGDRHSRLSENRLLRSLPSLKTRLSVRHSRKTSKEAGTVPSTEKQTGSDSSRRRSRIDEEDEEQDDRAPTPTPATITRTGAPAPAVTYVVSPVDSSASVAVNDDGLSASVLALPRGERSNSVRSIAPVMSRMLEAKAELAARPSFDFDRRSSDKSRTANNDSNDTDVDSDDAIGSSALARKLMEIFDFEKPEEVIEEYPCWLLQSVLLQGYMYITANHICFYAYLPKKANEVSKSGYLAKSGKRNPKYNRYWFRLKGDVLAYYRDPSNLYFPHGQIDLRYGISATVTDRDKDGVHFQVVTHHRTYYFRADSAPSAKEWVKSLQRVIFRSHNEGDSVKISLPIANVIDVEETQTMVEFADTCKIRVIDNDETYAIDEYFFSFFDYGKDAVRVLRILIEDANQQQQSPKRGRDHTDESLALRLQMRSTASPQQSADDADESASASAPERGPAAPGASGSFNGNIPAVASASDSRILKATKLHSSVRATLSPVSPPTSPRVSGEFPRSSFDALRTSFSGRRSLDTSVAQLGEAPPRRSFSDYSRRSLSTDRDRRPARSSRQQQQRHPLAGSTDSMVPLSSMDPSVASLSGLVVSSTENDQSSASQILHGSEIFKGPTIVHRSASASRRREGKRASWQPGRTSGSARHFDSGRVGDSEHASSADSQTLPSDIATGGGAITPGGTASLQRLAKMGSYPLQRAGAYAGWLNQQSRRMSSLLATESMGYVEKVSGMWKGGHRHYNEGPGPGSGLMRMGEELDDDTAGMGGAGGEGEAPDLAVINERFRAHFALPETERLQATYFGYLMRVLPLYGKIYISDRSFCFRSLLPGTRTKLILPLRDIENVTKEKGFRFGFSGLVVVIRGHEELFFEFGQAEMRDDCSVTLLRGFESARYLRESGLLNEDEKAGAQTALAERDALQEARQASREGEEGGGENDNDSTPAAANVMRLTESPTTILFDDPRASFLNFKPAEPLRITCLTIGSRGDVQPYIALGKGLQADGHHVRIATHPEFEDWIRSHGLDYGRVEGDPGELMRICIENGTFTLQFLREANSKMRTWLDELLASAWTACQDAELLIESPSAMAGIHIAERLQIPYFRAFTMPWTRTRAYPHAFIMPEHKMGGAYNYITYVMFDNIFWKATASQINRWRNKMLGLPNTTLEKMQPNKVPFLYNFSSSVVPPPLDYSDWIRVTGYWFLDEGKKEGKDGKDKKDETPPWSPPQDLVDFIAKARQDKKKLVYVGFGSILVPDPAKMTQEVIDAVLKADVRCVLSKGWSDRLAGDKDKADDDDHTRVEVPLPPELFQIKSAPHDWLFAQMDAAAHHGGSGTTGASLRAGIPTIIRPFFGDQFFFGGRVEDLGVGICLKKWGATSFARALWEAANSGRMIKKAAALGEQIRQENGVDTAIQCIYRDMEYAKSLVRAKAGKTTGRGSETGAAGRTAAPDDYEEEPEESWTFVGNDDSNNVHGADLMLQSVILSPDGGKSGKALGSRVLGQVAV

SEQ ID NO: 7970 - protein, 1501 aa, Blastomyces silverae
MPPDDESRTTGASGRSKPHPTSTYRLSSSHIPDRLRMGDDEQEDMTAPPGGTAGRGGRFQYMHQSVFSMIAAASSKKDFHNRFDESSDAEDEDANADADRAFKSRFLSNDGVGGRRRAGSASTSHLPHLVKRDKTTISSTAEERGRSQHRKKLSEHKFLKSLAKLPHRNNKGMEPASEPEPELEEPTVTGEPSSANAVQLVAATEAPVLSRMLDAQSRFGEYEAPPSSTERSRKDHHERKESSPASLLSARLMDIFGFDRPEKVISEYQCWLLQSVLLQGYMYITERHISFYAYLPKKSHTTIKSGYLSKRGRQNPKYNRYYFELKGDVLSYYLDRSNLYFPSGHVDLRYGISANLAEHKGKDKDKDVKDFTITTNTRTYQFRADSAMSAREWVKALQKVIFRSHNEGDSVKISLPIENVIDIEENPVIDFADTFKIRVVESGESYAIDEYFFSFFECGKEAIEVLKKMVSNTPAQQIPQTMLAPDAGYTSRRRRSHSVDEISPPSTHGTTLLSEAVKATLRPHSPLGSRSGSPKQGLDRPRSPFRRFSRSRGHSRESSGAGLEQRRRSGSTNRASVGDNQAETSPGGKLLNSSDSFVQSLEHATDSSAILQSTNGTVESASQILNRSDVFQSPTIHKLRDTLSGAGEAPRRHSEDTARFAPSPADVRIHPPSRTQTTQSLTKPEHQDGGSDSEHDLQHRSVAHSASSPTLQELMKAGSYPLQRAAGLAGYLKSRSKRMSNLLATESMGYFEKVSGMWIGGKRHYGEGETILPDDRMVDPEDEEQGCEHGDRFRAHFALPSSEKLQATYFAYLHRVIPLYGKLYISNRKFCFRSLLPGTRTKMILPLRDIENVEKEKGFRFGYHGLVVIISGHEELFFEFNTADARDDCAVTLHQNLESIRYLVESGLLAQQDREEAEAARAEHQMLQEARLEGMEEEHSSQTLSASAPLSPTSSPILFDDPRVSIVNFKPQEALRITCLTIGSRGDVQPYIALCKGLMAEGHIPKIATHREFEPWIRKHGIDFAPVEGDPAELMRICVENGMFTYSFLKEASSKFRGWIDDLLSSAWASCQNSDILIESPSAMAGIHIAEALGIPYFRAFTMPWTRTRAYPHAFAVPEHKMGGAYNYITYVMFDNVFWKAIAGQVNRWRKRELGLRSTNLDKMQPNKVPFLYNFSPSVVPPPLDFCDWIRVTGYWFLDEGADWQPPAELDNFIKQARADKKKIVYIGFGSIVVSDPAALTKTVVDSVLRADVRCILSKGWSDRLGDPSSAKVEIPLPPEVHQIKSAPHDWLFSHIDAAAHHGGAGTTGASLRAGIPTIIKPFFGDQFFFGSRVEDLGVGICMKRLNVGVFTRALWEATHSERIIVKAKALGEQIRKEDGVGNAIQAIYRDLEYAKTLVRQRSNATSASQAGIVPVATEGSGAGISSETGLDEDGDGEGDADADAAMEDSWTFVGDEAGTELARKTRARERDYDVPVDVVAARVTGSNGSSGSGSHDGRSG

SEQ ID NO: 7971 - protein, 569 aa, Medicago truncatula
MGCNGIEHLCTEVVEDEKGLRKMDDDKLVSVRGEIMSQEDDGSPSSKERGSQSSEVTSLPHRGLEHCITAPIGTERNPLIAEDEIMISRSMTEKRGLRRHDLLLDRLSEDEKQKLIANLVKIQKDGTVQVDIETSASVASELLEFQSFEESVASGNFIISDSNKSVPRLQIVILVVGTRGDVQPFVAIAKRLQEYGHRVRLAAHANFKTFVRSAGVNFYPLGGDPRVLAGYMARNKGLIPSGPTEISIQRKQLKVIIDSLLPACTAPDLETGIPFTAQAIIANPPAYGHVHLAEALGVPIHIFFTMPWTPTYAFPHPLARVSQGAGYWLSYIIVDLLIWWGMRGIINDFRKRTLKLAPIAYFSMYRGSISHLPTAYMWSPHLVPKPSDWGSLVDVVGYCFLRHESNYQPREDFLHWIKKGPPPLYFGFGSMPLEDPKITTDVILKALKETEQRGIIDRGWGNLGNLTEVSDNVFLLEECPHDWLFPQCSAVVHHGGAGTTATGLKSGCPTTIVPFFGDQFFWGDRIHQKELGPAPIPISELNVENLSNAIKFMLQPECISGEISDNGSC

SEQ ID NO: 7972 - protein, 402 aa, Streptomyces longwoodensis
MTVGSRGDVAPFTGVGHGLVRAGHEVTLVTHARFAPLVRGSGVGFHALPVDPRAELESARGRGLHRSGSGAGKLLRAAGLARSLVGRITDDLIAAARTSDLLLLSASVAPLGQAVAAGLRLPSLVLPLQPVTATREFAPPLLGGGSYGALGNRLAGHGLERTVPWVFGPALPALRARLGPAAAFGPTPGRLLHGFSPQVVPRPRDWAPGLDVTGYWWPHDHVTRLPPTVREFLDAGPPPVFVGLGSATVPDPGRLSATVVRALRRAGLRGIVQRGWAGLTADGDDLLTVDEVPHALLFPETAAVVHHCGAGTTAAGIRAGVPAVPVPVQFDEGFWADRLVRLGVAPRALPLRRLTADTLAAALTRATGDPAHRERAARLAARVRAEDGVGRVVAAVERLGRA

SEQ ID NO: 7973 - protein, 847 aa, Rhizoctonia solani
MYPNQRDSAFSNGRSQRYHSYQELPVPASSAPSSAYNSPNSAARSFESLAQATIQPPPPPLYTRHDHGSQAGPSEPRHSYSSSTSQITLPEKDLPGLPGYTQLDAKTAVSEDGRLTISFGHRMSKTFPDSYGAPVHEIGIDETGFRSAPRMNINIMIVGSRGDVQPYLALGKQLQQYGHDVRLSTHETFRKMVKDAGLRFYNIGGDPHELMSYMVRNPGLIPGIKSLRNGDIGKKQKMVGEILEGCFASCFAPDLGSGEETGFAADAIISNPPTFAHIHCAEALGIPLLLSFTMPWCPTASFPHPLVNIKQSENTEPNMANYYSYGLVDMMTWQGLGRTINKFRMKRLGLDYLTTASAVGMIERCAVPWTYCLSPALVSKPADWMSHIDVVGFYFLDLASDYSPPENLVEFLKSGEPPVYIGFGSIVLQNPQEMTRAILSGIAQAGVRAIVSPGWGGLDEDLIRSAGPHIFALGNVPHDWLFQHVSAVCHHGGAGTTAIGLKCGKPTIIVPFFGDQPWWATQITRRGAGPPPLDPKTLTAEAFAVALRIALSSTTMRAAEMVGEMIRRESGTQNGVDSFHRHMPLLNMRCDLDPTRVAVWYSPMHEMRLSAFAAQVLSEGGYIDINKLELHRSREYASHADVWDPVSGALSPAMKIFSDFGRGVSKLPTRPDKGMGQIVAAGTFGAQSTLQGFSSGMANLPRLYGGQMRERKKVNGVGSGMVEGTKSLLFGAYDGINDLFMEPVRGYKEKGILGAAAGMGKGTLSATTKPLAGVLQFISQPLEGTAKDVRSLFRKQVGKERIAARYAEGVLAVRKASQKETETLVQTFIEMRGRAGMGGKGKSKAVW

SEQ ID NO: 7974 - protein, 1203 aa, Saccharomyces arboricola
MPITQIISASDNETGSKPSTPLVPDMLSRISRRHHRLSKSLSKLKHLRSRSESSSSIDSAEQQDMKTGLNEVYSDNADDYDDDGLSNDNADDLAKSKYMMKSIAGLLTTASVYAGMNNAQEMNTLTRIDSEESDSNESGQANLGENEVRSKKENLQKPSPDALRSDKRSLTLFDFSVTKEKLSKENVTKLRERFCLEEQESFLYDFPAWLLKDVLVQGHIFITMKHFLFFAYLPRNPRSVKMSGNLNIRTKLLRSTRYWCVLKNHLFSMYASSTELYFPVLTIDLRDVQKIEPQKSSLNRNTMKAFKLYTSESTFKFNADSEFSAKSWINALKKEQFAAQNSENNSISLKIPLPNVIEIDDQPIVDKALTLRLRALESSQTYAIDDFMFVFMDGSGSQVKDSLCQQLAALQQSGVSTLYNDISAKNAISSDEKGLSATAELRKVEKDDSKDSKYSTVQNPAVPSSENGKKGKFELRERRNSWFRRAKCLEDSQIEDVEEIYKDATDEIDSYTNSAIQAQEGEDNQEQGVDWKQSHLKNFAEMWAAKPIHYRNKHIEFEKDDPYLTKETEDISANERFRFHFKFNKDMSLISTYYTYLNRNVPVYGKIYVSNDVLCFRSLLPGSSTHMVLPLVDVETCYKEKGFRFGYFVLVVVIHGHEELFFEFSTEVARDDIECILLKLLDSIYTSSREGSNVSTTSVGDVQHNPDSAKLKLFEDKINAEGFEVPLMIDENPHYKTSITPNKSYKFGLLTIGSRGDVQPYIALAKGLLKEGHQVVIITHSEFRDFVENHGIQFEEIAGNPVELMSLMVENESMNVKMLREASSKFRGWIDALLQTSWEVCNRRKLDILIESPSAMVGIHITEALQIPYFRAFTMPWTRTRAYPHAFIVPDQKRGGNYNYLTHVLFENVFWKGISGQINKWRVETLGLAKTNLFLLQQNNVPFLYNVSPTIFPPSIDFSEWVRVTGYWFLDDKSTFKPPSELEKFISEARSKGKKLVYIGFGSIVVSNAKEMTEALVEAVVEADVYCILNKGWSERLDDKGAKKVEVNLPKNILNIENIPHDWLFPQVDAAVHHGGSGTTGASLRAGLPTIIKPFFGDQFFYAGRVEDIGVGIALKKLNSQTLAQALKVATTNKVMKDRAELIKKKISKEDGVKTAISAIYNELEYARSVTLSKVKGPRKNDDNVDKTKLPSGETTDEAWTMI

SEQ ID NO: 7975 - protein, 416 aa, Calothrix sp.
MKIVIITVGTRGDVQPFVALGVALKQAGHTVTICTSSRFQLFISEYGLNYAYMNDQLLKLIDTDAGRAAIESKGNAFFLWQQTMPIIRQTLDEAWIAAQEAEILIYHPKALGGYHIAEKLNIPGFMSLLLPLYTPTTAFPSPIFPNLKGGWYNQLTYQLLPLLTAPYLNVINQWRQERLGLRPRSWNEKEILGSYGDSSPVLYAYSSHLIPRPSDWDSSTIVTGYWFLDAPADFVPPPQLLDFLANGKPPLCIGFGSMTGQNPTALREIVLTALKNTGQRGILLTGWGDIGNADLPNDVFKLEAIPHDWLFPQVAAVMHHGGAGTTAAALRAGIPNIIIPFFGDQPFWGQRVEALGVGPKPIPKKHLTAEKLAAAINVAVNDEEVRRRALSLGAKIRAEDGVAQAVKVINRFSSLS

SEQ ID NO: 7976 - protein, 622 aa, Triticum aestivum
MGCNSEAVAGEGSGSGDLRRRRGGRDGAGASSSSSFAEGTREFVLSSMDERFSGSVDADGFPSSRREGFGHSKSTTATSSRFRGQDHAFVRSYSDRLLKCDLTLDMLSENEKMKIIEKLVKIQKDGTLEVDVTRSALVASELSEIDAFGSVPRDVEEVKSGFSKSVPKLKIAILVVGTRGDVQPFIALAKRLQEFGHHVRLASHVNFRTFVKSAGIDFYPLGGDPRIMAQYMTKNKGFLMAAPTEISVQRKQVKEIIFSLLPACTEPDLDTGIPFRAQAIIANPPALGHLHIAEALGVPLHIFFTFPWTPTNEFPHPLARTPQSATYRLSYLIVDLIIWWGTRGFINDFRKKLNLAPIAYFSTYHGSISHLPTGYMWSPHLMPKPNDWGSLVDVVGYCFLNLGTKYQPPPELSQWLQQGSKPIYIGFGSMPLDDEKKVTAIILDALREMGQRGIISRGWGDLGSFSEVPADVFILEDCPHDWLFPRCTAVVHHGGAGTTAAGLIAGCPTTVVPFFGDQFFWGEIVHARGVGPAPIRVTELTTEALSNAIRFMLDPEVKSRSLELAIAIGNEDGVAAAVDSFHRHLPSELPLTPPPAPAEEERLDLLQLLSRYLEKCCLPFNS

SEQ ID NO: 7977 - protein, 410 aa, Streptomyces glaucescens
MTAGSRGDVAPFTGLGQALVRAGHEVTLVTHGRFAPLVTGSGVGFHALAVDPRAELLQTPRGQGMSRSTSAVGKMVRLAEMARAAAARMTDGLLAAAEDREVLLLSGSLVPLGHGIAEGLRLPSIGLHLQPLDPTREFAPSVLGARSWGAVGNRLAGHGMGLAMEQVLSTAVLEVRDRLGLPRQRPWAAWRARERADWPVLHGFSPLVVPRPRDWRPGLEVTGYWWPYDRDPGLPPELRDFLDTGPAPVFVGLGSATVPHPERLSAELVRALRRAGLRGVFQRGWGGLAADGDDMLTVGEVPHSVLFPRMAAVVHHAGAGTTAAGVRAGVPAVPVPVQFDAGFWAARLVALGVAPGVVPLRRLTAGTLAPALVRATRDPAFRERARTLAARVRAEDGTAAVVERVNALRG

SEQ ID NO: 7978 - protein, 885 aa, Aspergillus calidoustus
MASNRNAEVFELPGDSVMTTTMASNNHPEVFELPGDPVTIPPTPIAGDSKSGISITSDGRVDIDYNTTLIRRFSKLYTSHYSPRPTTPPPEYSEIAPQAADDNNIRFGSPPAYPESSWKIKLNILIQVVGSRGDVQPFVALGNELQRYGHRVRLATHDVFEDFVRGSGLEFYPIGGDPEELMAYMVKNPGLIPSMRSLQAGEIGRKRAMIREMLDGCWRSCVEPDTATQLPFVADAIIANPPSFAHIHCAQALSIPVHLMFTMPWTSTKAFPHPLANLTGGGDEDQGFRNFVSYGVVNWLTWQGVGDVINQWRKELGLDEVAMFEGPRLAEILKIPFTYCWSPSLVPRPSDWPSYVDVCGFFFRESPKYDPSADLLSFLAAGPPPIYVGFGSIVLEDPERATAIILNAVRAAGVRAIVSKGWSNLGGMRDDNIYYIGDCPHEWLFDRVAAVVHHGGAGTTACGLRKSKPTIVVPFFGDQPFWGDMVAAAGAGPTPIPHRELTVDRLAEGIRYCLGEQARLAASSIAAKMQSEVGVKAAVASFHRNLPLERLQCDLDSGLAAVWSFSKSRRKFKLSKIAAQALIADGSIDAKSLTIHAIRPIFIENRRWDPVTGGASAVVGTATDVADSVLGAFYKPVLEYRNYREEREDPLSSRRSNRSVDNISKELSVDRVSTDHEKEPKGLEVASSNASTLSADSHSQKRTNTGKGKLLGRMAGASAKSLGSVGPTMIKGATVGFPLAITEGLRNVPRLYGEVPRDHGPVTDIKSGFAVAGKGFAWGMAEAVSDIVVKPYQGLQEEGAKGAIKGVGKGVTNMAAKAGSAMFGLMAYPTAGIAQSLRSSGQSQTRKLIAKQRHSEGIWLLESGQCPATDDIVATFRQKLKSKKA

SEQ ID NO: 7979 - protein, 1525 aa, Rhizoctonia solani
MESSTSPPNSIQNPIRGTTINTSAGQLGLSNSQAHPQAHPQSTMSESHDSSDESDGGKGILKRTVEKIGRNTSLTRSKRHPDTDSRAHRRLFSLSRHKGKDRAADEFAGMLGGHAAGGGSSDADVSIQKSRTPTNKSPKSSPRVPRMAATTSDLRRNKNQASDSRPSLSIMGLGKQDEFGIGSMRMGTQALIQALQAMPWDDDRDEDGPESAAKRDRGKARREPVSPDSSDEEGQAKADFVLASSIHTIHRPVAHSRLATPSFNQSIHYGINPPLEVAEDYFSNPLSADEDDALRDFDDATAPEGLPNPFKDPSQMRLQLPADKLPKTEGKRRMPPTVRTASMATVRMKRRTKLAEKLKEVFGIPEIKEVVAGRLDALVKIGCSCLFIRKHARWLTYLGAVLQGYMYLTNTHLCFFAHMPTREDQVLKSGTMSKKAQRTKRWNKHWFVLKNDVLSWYQSSSVRFRYDPYFPHGNIDLRYAISCDAHREKGIRLRTNQKTITLQADSVPSRDEWVKTIRKVIFKAQNMGESVKIAIPYSVIDGVERSSAMDFSETIEVKVIDKEENYALDSYFFAYFRDLPAALAQIQQVLSDYQDTTPAVEVHLTDTTQINRSPQQLHLDRTTSAPASSHQNDSTSGFRISSLLSLRPFSTTSGNEEIHKGSSLVESQGGESVPIQRDTINSESAAPGTSSVLSEVSVHTYPPSPSNQAPPSTHSNRTSISSNWSVPGYNWLRGKRIFSTPSSNEWGSRSTEGNVSEIISSPRLDQSELSVSSDGHNLGFSILEAAEDGKLADAGLEEKFRSTFALDDKEALLGCIPGSLFRVLPVYGRLYVSTNYFCFRSSQPLTRTRMMIPIRDILSTEKQKPFRFGQHGLVVVIKGHEELFFEFGSSERRDTCRSLLEMQKETLEKQALSPISPTPTQGKRDALILEELEPSMLISDDDPRPAPEVLASDAPVMFASTSSTLLTFKPEKPMHFTCLTIGSRGDVQPYIALCKGLQADGHKVRIATHKEFQSWIEGVCSLHTMVEMTTLIQRSLFQFRGWIDDLLETSWLACQGTDVLIESPSAMAGIHIAEALKIPYFRAFTMPWTRTRAYPHAFAVPERKMGGSYNYMTYVMFDQVFWRGISGQVNRWRRHTLRLPSTNLDKLEQHKVPFLYNFSPTVVPPPLDWYEWIRVTGYWFLDDPEDSSAKKWTPPPDLVKFMDNARRGGKKIVYIGFGSIVVSDPDAMTQCVVEAIKLSGVHAILSKGWSDRLSTKKSNTETPPTYPPQIYPISSVPHDWLFERIDAACHHGGAGTTGASLRAGIPTIIKPFFGDQFFWSDRVEALGIGSSVRKLTVENLTAALRAATTDVKQIERAKLVGQSIRENGVRTAIEAIYRDLGYATELFRKDTQVDLDADGSEDETIQESKTPAARRSSLDPVMIGSDSSCGSGRGNGEDSSWSVISDHPPPERVRVESIGSEKRPSGESGDDSISEAGTPNADQTQQTQASGSRGLSGLPAIGLALLQETLTAYSPSARGEPNGKQ

SEQ ID NO: 7980 - protein, 1188 aa, Antrodiella citrinella
MHDDDPTGHPITQVPEGPPKYPQNVDSDKGADFATSPDARASRVKRAMEKTADKLGRSKSAGNKSPAMTQSQPSLPASGHRRIFSLNRSKGKERASADGRRFIILSNGSQEISSGERLDEMATAQSQYITTPTSPSPAGRYTGRSAATAADDDSPFITPRSPPFGPTRSVFNIFRGDGSLRAGTQTLIQALQAIPWATDDQDNDDDAAHQESTDSESDEEDKPASWLASSIHTIYRPVARSRRKDRASRSRPEPHKHGLSDIEDEPAPEEPILSDEDIEEDFEPTAHVSHKSFRERLSITLPPLPELEPSALTGVTKPVPVRSGSMATVKVQRRARLAEKLRDIFELQGISEVIAVGEKDIRLRTNQKTIRLAADSIPSRDEWVKAIRRVMFKAQNMGDSVKIAIPYSAIVDIERSTAMDFSETIEVKVIDKGDTYSVDSYFFAYFHDLPGALEQIRDAVRSSRGIPEDTTPPAVIDTTISRSPPPTPVPTDRLSWLPILEAPGLPLDLDVVEKFRTAFAFDEKESLLGYFSGYIFRLLPVYGRLYISSNFFAFKSSGPLTSRTRMILPLRDILSTESSKAFRFGHYGLVVIVRGHEELFFEFADEERRSAFNSLLQRQMEDVRRRAAAGEEHPRTEGQRDALILEEFGPRAQTTGSEILPEPESMSGSLPAVMFTSTSSTFLTFKPKESLHFTFLTIGSRGDVQPYISLAKGLIADGHKCRIATHGEFKEWIEAHGIEFGYVGGDPAELMRICVENGMFTVSFLKESMAKFRGWIDDLLKTSWEACQGTDVLIESPSAMGGYHIAEALGIPYFRAFTMTWSRTRAYPHAFAVPEHKMGGNYNYMSYVLFDQVFWRGTAGQINRWRKNTLGLPSTNLDKMEPHKIPFLYNFSPVVVPPPLDWPEWIRVTGYWFLDDANVGAAKWQPPPDLLEFIDTAHKAKKKVVYIGFGSIVVSDPKAMTRTVVEAIVQSDVYAIMSKGWSDRLVKTSTTDGPDTAEPLPKQIYQISSIPHDWLFKRIDAACHHGGAGTTGASLRAGIPTIIKPFFGDQYFWADRVEALGIGSAVRKLTVPHLTEALLAATTDQKQIDRAKMIGENIRAENGVATAVEAIYRDLEYARSLIKGRVHAMEHRDAFDASDHEHATIRESKGHSPHPRTGTHSGHSSIDSSRRGAVSDWSVISDQEDAQS

SEQ ID NO: 7981 - protein, 1465 aa, Suillus luteus
MSKLSPWKPHARNTAAPSPQENENLSQDPRLLDHVEQDEDSSSSPQSRAKRLALRTKDFSKSIGGRAQSPSSPKSSGEHRRMFSLSRKGKAKEPSDQSEVAVAPSTSLIPKQVPSNGNIDTEALLSDAVQDDSPFIRPPSPSPLCNRPTLQAFRGTGSMRAGTQTLIQALQAIPWADVSDHDEDLTNVITPHGDDDSDEDSGAVPMASSIHAIYRPVARSRRTEASLSSRTVLPSPEEGHESSDGDLDGICLSEEDADAEDFEAATPRPEHVPKPEHATSELPMAFRPGVHMRRRASSHAGSITTVKVDRRARLAEKLKEIFELNAIDEVLAEMPCWLLRSVLLQGYMYLTNSHLCFFAHMPSREDQILKSGTLSKKANRTKRWTKHWFVLKNDALSWYQSSSDPYFINGIVDLRYAISCDPSGEKEIRLRTNQKNVLMSADSVPSREEWVKAIRKVIFKAQNMGDTVKIAIPYSSVIDVEKSSAIDFSETIEVKVFDKDQEHYTVESYFFAYFQDLPVALEHIRDAVRSHRSLVTRSPLALLDTTATRHPQPSATQGMDRAKSLPTPDTRFGSSFRLSSLLRPFQDSLPASLGRMNNVPGAPEPTEVPDDYTHIIKRSGSSLVPITTSPDPISSPESSKALHALSRASTIATPTDHTYPPSTSVSDLASSPSAKSFPSSAPWNVGVPSWLKVPRSRLSTSTSNASSLHASPIGDGIHEVYSVPESTTRQSSGITQGDLGYSVLETPEAAVDPEATEKFRSAFAFDEKEILLGYFTGYLFRLLPLPGRLYVSTNYFCFKSTGPLSSKTRMILPIRDILSVEKTKGTRFGHYGLTVVIKGHEELFFEFGFDDRRKAFVGILDRQMEEVRKRTSAGDVSVLSQGKKDALILEEFEPGNSSDSDPTPPPESMSESLPAVMFTSASSTFLTFKPKESLHFTFLTIGSRGDVQPYIALAKGLMEDGHRVKIATHGEFREWIEAYGIEFGYVGGDPAELMRICVENGTFTVAFLKEGLSKFRGWIDDLLKTAWEACQGTDILIESPSAMAGIHIAEALKIPYFRAFTMTWTRTRAYPHAFAVPEHKMGGGYNYMTYVMFDQVFWRAISGQVNRWRRNTLHIGNTSLDRMQIHKIPFLYNFSPTLVPPPLDWPEWIRITGYWFLDDAEVGAKKWTPPPDLLPFIDSAHEAGKKVVYIGFGSIVVSDPVAMTQCVVGAVLRSGVYAILSKGWSDRLQTKSSDASEPEEPLPKQIYSINSIPHDWLFQRIDAACHHGGAGTTGASLRAGIPTIIKPFFGDQFFSADRVEALGIGTGVRKLTVESLTEALVSATTDIKQIERARLVGEQIRIENGVATAIEAIYRDLDYARSLIKRTPHESEAVHDVEGAARDEQNAQSTLERSGSGSRASVDSRRVSEDWSVISDGDDRRPSGSGRVSDGKLDRSSTFKRSSLAAAVMSVLPDALTPHRQSTAL

SEQ ID NO: 7982 - protein, 1670 aa, Wallemia hederae
MKTSLRNLEKASQKLFRDAIKEESTQSTQSTQSHNKPLRLSKLATDAASKDAWDGDEHPHDTSLRMLLDARKPLRGGDKNPYREGRLKTVQQPAQPSQPSHLENLIPSDPNYMPWHAEYVYPSHASGSSAAPSIYRARKLESQALEKVQHMEVDSKTKAMIRDTKRSKTKVRRLVNAREGALDYSLAGSLDEIENTNETKERHRVQSQTRPRPQSLKAWNSLVEEQIEDAHRKGQFKNLNGRGKPLASVSQGNAFISREEFLMNRLINQQGAVPPFVELQMTMQSEVMSFCNYLREEYVKRGARYLDRNATEDSVRRWRDVDWENRQKSYHTILIDRVNSAIKSYNAIAPPFSRRGLLLLDREVENARLSAVPLIVASLAGDGKSVETAPGSAAPAKSDTWLGRIRGNSGDTRDTQAVQMSQSTPDASHASPPPPISSTGINEGYFQSIPPNELTQQGTSSAFLTPHSSWRGDVNMRMGTQSLIQVIQAFARHADDNSNDDEEDTHEEQPQEQNVMDMYSSLNTVHTEHDDNNDAHNLPESSASTPQTNTPHESDNDSDDGMASDDSAIKRSRSQSLKKKSAQRRRTLSTKLAEIFNLQDEEEIHAEYRCSLLGSSYRPMLEGFLYSTDSFLCFFAHVPIPARDIVVKTGAIGKRTLRTRRIIRYWLALKDDVLSWYGSATDPYFPVGNIALRYAIRCVTVKNSDREFSIVTSERKFTFVADSPVGRNEWVKVIRKGMFRSQNESGSFKLVVPYDHIIDIERSSNLEFADSVAVSFVNNEDGSDCYYFDHFKDSQLASDVLRQILDSHRQNVHRILSNENLTSSPTRLKEEFLDGSEVTARPTSRGQGGDHTYPPHNTTQNRSRSASLTAEIPSWIKSGSLKLGKAVYSAPRMIPHPHLSTILPRLPSIPFLNNNNNSNNSATQQRQTLPNLTPATHTLMRTDSRVCETYEEPAHKETSRSRSNTASSSEFEEVGSDFSVLEHSAGLEDVLKVEEEVQNKFNDYFALSGESILGHFNCALFRVYPVPGKVYITNNYLCFRSFQILGRTKMILPLSDLQAVQPHKPLRFSFHGLIMIIHRHEELFLEFTTVNRRDACEKLLSTQLDRLFRRSALQHTESSKGLQEAQIIEDLSLSYRHPSLTAPVMHDDSLSSSTSVVSFKPTKSLRITCLTIGSRGDVQPYIALCKGLIKEGHQCRIATHGEYKNWIEENGIEHREVGGDPAELMQICVEHGTFTLSFLREGLFKFRSWLDELLKRSWEACQETDLLIESPSAMAGIHIAEALKIPYFRAFTMTWTRTRAYPHAFAVPEHRMGGSYNWMTYTLFDQVFWRAISGQVNRWRRSTLHLKGTNLQRMAQNKVPFLYCISPTLVPKPLDWNEWIHVTGYWFTDSINTDNDENKKELEWEAPEGLLEFIGEGRSLNKKVVYIGFGSIVVNDPDAMTRTVVEAIERADVYAILSKGWSDRMHTDKKKEELHLPKCIFSIDTIDHAKLFPLIDAAVHHGGSGTTGASLRAGLPTVIKPFFGDQFFNADRVEAANLGASVRKLTVDSLSKALKDATTDEKQIANAKKVGERIRSEDGVGTAIKCLYRYMEYAQNVVTTRANDHDKMVDTNDDTNDNETDNENLDDDWALPSENMTDDEMHESFGVLSLASNLGKKSLGVGKDLLLKKT

SEQ ID NO: 7983 - protein, 1366 aa, Aspergillus ruber
MALRDDTKGRLEQRLSPGKKSKSTTRLYSHPLPERLKHDGDDAQVDFTAPPGVSGSKDGHMHYMQQSIFSMIAAVGSRSDFHTRFDESSESEGEIEERQQKDGSSDRQRKAGIPEKELQSTLEERGRSHRRTTSEKKLLSPLERLNLKHGGGNMSASQTVGSPPRRPRSATPRAAPVLSRMVEAKSRLEKTPSTERLQPEPKDNTQNDTEQQSASLLSTRLMEMFGFQKPEKVVVEYACALLQSMLLQGYMYVTEGHICFYAYLPKKSTVAIKSGYLYKSGRKSPKYTRYWFSLKGDVLSYYADPSNLYFPSGHVDLRYGISASLSEKDKGKETRDFQVTTDQRAYYFRADSSANAKEWVKALQKVIFRTHNDGDSVKVSFPIENVIDIEESPMAEFAETLKIRVLDSGDTYAIDEYFFTFFEFGQEAFEFLKGLASEASSNRASQLPSPQRDHAQKRLSVASGTGLPDNDQTGRRRRSVSGSHFSSVGQGILDKSPPVKQQDSSGLFGSSIDQESESPFWHSNTVESASQILNRSDVFQAPTIHSLGRQPSDAEGVTGRRYSDDTARFTSPHASHSFSPRKDDYEAQDSGLDHTAQDPTKVQSSTASLNELVKVGVYPLQRAAGLAGYLRTRSKAMSNLLATESMGYLEKVSGMWVGGGRHYGEREGIISEDQAVDPEDKEDGCKYGDRFRAHFALPPSEKLQATYYAYLHRVLPLYGKIYISQKKLCFRSLIPGTRTKMILPLRDVENVEKEKGFRFGYQGLVVIIRGHEELFFEFNTSDSRDDCAVTLHQHLEAAKFLMESGILAEQEQDGSEAAQAEHLMLQEARLGGADELESRGSLNGSSELNPIFDDPRASIINFKPTESLRITCLTIGSRGDVQPYIALCKGFIAEGHRPKIATHAEFEPWVRKHGIDFAPVDGDPAELMRICVENGMFTYSFLKEASSKFRGWIDDLLSSAWASCQDSDLLIESPSAMAGIHIAEALQIPYFRAFTMPWSRTRAYPHAFAVPENKLGGAYNYITYVMFDTVFWKAIAGQVNRWRNNELGLKATTLDRMQPNKVPFLYNYSPSVVVPPLDYPDWIRITGYWFLSEGSDWTPPAELTEFIQRARADGKKIVYIGFGSIVVSDPQALTRTVIESVQKADVRCILSKGWSDRLGDPGSVKVEVPLPTEIFQIQAAPHDWLFSQIDAAAHHGGAGTTGASLRAGVPTIIKPFFGDQFFFGTRVEDLGVGICMKKLNVSVFSRALWEATHSERMIVKARDLGAQIRSEDGVGTAIQAIYRDLEYAKTLARQRSIASSTPFSPKPSPKNADEPEASDDLDDIEEWTFVGDDTDIDISKRMRDRAISDIDMLPGRLHENIGVGES

SEQ ID NO: 7984 - protein, 201 aa, Unknown
  Description of Unknown: Oryza sativa Japonica Group sequence
VPSMGFLRNPKAFLMVLKAVIEKTDYRFILFSSGYQPLDSAIQYFAPSVAESSEYQASALHCDSNLLFNGRLFCFSGSIPYSWLFPKCAVAIHHAGSGSTAAALFAGIPQISCPFLLDQFYWAERLHWLGVAPEPLGRQHLIPDTDNASSINSAADMLIGAIKSALSPEIKAQATRIANKLSSEDGIGEALRILKESFAPN

SEQ ID NO: 7985 - protein, 1083 aa, Laccaria bicolor
MSVLARLFSLSSKHKSKHSDTFSLDRGSSIDSSHIDEDATDSPRCPSISQLYNEANAFEKVLQCSGCVKPLTSRTRTSNSGFESLVRHDLNQSELAMANHDAKVAATASSWVTADLDSKDSVQYDAEDEYRISSDSSSDADIALPTIHRVPNHDNEELAKLKPEEIVRILIQEFGELAGPDEEELLLLETDGCLFSEISVVGVIHLTTHRLTFHASLLATRPDLSPSRQVLKAGPATFHRKGWRVKRRLWVELTHDMICSYASSKEEDKTRPLCTTLLSFFHEVLPIDPKHPRFIRFVIKDAAHSANDYVELDTEESAHDWRREINGALSLQRHRRMELYSPTADSEAGVRLSCPLDRIIDFQTHCNADFLHLVSFRVQLTPADCKEDVCEGMSESPVIQVGPVQHIPIWDQLQDRIDIAKRRVQNEPPNPQSVFFVDFGPFRFLQRDNVPSKDEGYITHREKAIRAALGFAAESELWFARARVYRTVTSVGYFAISRRHIGFWSKNLTQRNITYSIPVTLIRYAEPFHLNWVLVDGLTVGVEGQAEMRFVFRSAAIRDAALEHIKQSISSCQSGTVVASPISSRPGSPETQEASVKPTHHMRRRHAKSPERSATGIFAPLSRSLSAAVTAAADLPLNFQRRIPKVVNLPREILIARASLHFVCLTIGSRGDVQPYIALGLGLRKEGHRVTIVTHEEYRDWILGFGLGHRTAGGDPGALMKLSVENKMFSPEFFRLSLNNFRPWLDQLLVDSWKACSDADVLLESPSAMAGVHIAEALAIPYFRTFTMPWTKTSEFPHAFLSPPVESPTFNSASNVMWAATSSQINKWRRHTLRIGHTDMGHLAQSKITFIYNFSQVVVPKPLDWPDTTIISGYWFLDNPDLDWEPPTELIDWMEESRREGKPIVYIGFGSITVPHPNRVTSHIVKAVLQSGVRAVISKGWSTRMKSEDKGPEIEIPRECFLLDKVPHDWLFPRIDAAVHHGGAGTTGASLRAGIPTLIKPWFGDQFFWASRVQRLGAGLRVSLRVSDLSDALVKATTNQLMKDKAASVGRRIREEDGVHTAIFTIYTYLHRASQDRAMLDKH

SEQ ID NO: 7986 - protein, 403 aa, Streptomyces acidiscabies
MTAGSRGDVAPFTGVGHALANAGHEVTLVTHARFEPLVAGSGVAFHALPVDPRAELESARGRSLHRSGSGLGKLARVVGLARSLVGEMAYDVVAAARKSDALLLSASLSPLGHVVAEALDLPALDLPLQPITATREFAPPMLGAGSYGSLLNLLAGHVVDRSVDHVFAPALPSVRAELGVPRPPRRVRRPRRPMLHGFSPSVVPRPTDWRPGLEVTGYWWPYDTTTQLPPHLRNFLNAGPPPVFIGLGSATVPDPAALSTQIVHALRMAGLRGVIQRGWADLAAEGDDILTIEDVPHALLFPRMAAVVHHCGAGTTAAGIRAGVPSVPVPIQFDEGFWARRLVTLGVAPEAIPLRRLTTERLAEALRRATGEAEFGERARELGERVRGEDGVSRVVEAVGALG

SEQ ID NO: 7987 - protein, 1399 aa, Trichoderma reesei
MATTPTPRYISPDGHEDADAVTATATAPLSPPPNDDRTPTVELPEPLQGSDDETSENVGPANPGHMAVNLNQSIFGLIAAAGSRVDFNTRFDDGSSDEDEGSSLKPLRSRHRDLSQTAILGSLPAKDKRLGKKQPSGHRMLKSFASLPKRTSRSGKGSSRLWEPTQEVDEHSETSESPSPKISLQQPEDDLRIAPVMSRMLEAKAEMASRSSFDTERDSSEDNEHSDGEHVTELAKKLMEIFKFDEPERVIEEYPCWLLQSVLLQGFLYITSKHICFYAHLPKKTHTVTKSGFLLKSGKRNPKYNRYWFRLKGDVLSYYQDPTNLYFPHGHIDLSFGISASVTDEDKEGVHFDVVTSHRTYKFKAESAPSAKEWVKSLQRVIFRSHNDGDSVKISLPIDNILDVEDTQMMEFSDTCKIRVIDSDETFAIDEYFFSFFNSGKEAISVIKVLVENASAEGPTAGKVIAAQKEESSNQSSPHISGTAFRNLTRVDSALTTKPLGTARGDGSPAWADSTSPSADEAGVLSLRSSRGRSSSDNKTSDHAEERRESRLLESSESNLYSSIEEPSFASLTQSAFEDPSASQILRGSDVFQSPTMRHSQTSSHDYGEFKGKDAASGQGPHSSAAASQNDASSYSGFVEPPRTSTPTLQSITKIGAYPLQRAGAIAEYLNKTGKRMSTLFATESMGYVEKVSGMWKGERKHYDEPAGLRPDQDELEENDDGQIQTSNERFRAHFALPDTERLQATYFGYIMRVLPLYGKIYLSGRYFCFRSLLPGTRTKLILPLKDIENAHKEKGFRFGYSGLVVVIRGHEELFFEFRTAEVRDDCAVTLLQGLETTRHLLESGILEQHYRDDARAAIAERDALSIARGEALVDGKHDLSQSTALSHVPDMTPGDDMEASVVQFKAPHPMRITCLTIGSRGDVQPYIALCKGLLAEGHKPRIATHAEFQGWIESHGIEFACVEGDPGELMRLCIENGTFTLSFLREANATFRGWLDDLLDSAYKACEGSELLIESPSAMAGIHIAEKLGIPYFRAFTMPWTRTRAYPHAFVTPENKMGGAYNYMTYVMFDNIFWKATAHQVNRWRNKTLGLPNTSLEKMQPNKVPFLYNFSPSVVAPPLDFSDWVRVTGYWFLDEGSDYEPPQELRDFIKKARDDGKKIVYVGFGSIIVNDPVKMTQEVIDAILKADVRCILSKGWSDRITGRDEPVRPAAAAAVEEPVMPPEIHVIKSAPHDWLFRQIDAAAHHGGSGTTGASLRAGIPTIIRPFFGDQFFFASRVEDLGVGVWVKKWGTKSFGRALWEVTRNERMIVKARLLGEQIRKESGVETAIQSIYRDMEYAKSLIKHTDGHLEAEEDEDTEESWTFVRGDEPDPDVITTKLSEGLDGVALGNNNSKASVKA

SEQ ID NO: 7988 - protein, 421 aa, Gloeothece verrucosa
MLITMLTAGTRGDVQPYIALGVALQAAGHYTVRIAASLSFENLVTEYGLDFYPLPGDLSQIALDSRVRKAMQADNPLKIIMSFNRLKSLVFDLQKDFYRACQGSDAIIYHPGAAIGYFIAAAFNIPSILASPFPMTPTGDYPALIFYNFPRGGKSLNRLTHHIFEQIMWGMSRSHIKAFWQQEFGMAPPHFANPFKKQQTLQHPTIVSCSNYIFPKPQDWPEQVHNTGYWFLDKADHWQPPRELQDFLQNGPAPVYVGFGSLGDPTQSEQTTQLVIDALSRSRQRGILATGWNGMTRLASIPENVFMLDSVPHAWLFPQMSAVVHHGGAGTTAAALRAGVPSVVIPHANDQFAWGSRVYSLGVGAVPIPRKKLTAEKLSTAITSVLRAEVREAAKALGEKILFEHGASRAAKIIIHCLQQW

SEQ ID NO: 7989 - protein, 432 aa, Leptolyngbya sp.
MKVLIVTLGSRGDVQPYVALGQGLKTAGHEVTVCTSMLFQSFITEQGLHYGHMNNQLMQLMDSDAGRDAMENTNNLWGTIRTNIKLFSQVKSMYRQTLQDIWQTTQSVAPDLLILASKAAFMAEAIADKQKIPLVIALPFPQFVPTAQSPAMGFPDWPLGRWYNRLTYWIVHTAIGLYGGIPNEFRRQVLQLPPKPKGMDLLHRADGSPIPVLHGYSQHVVPRPTDWPEAAYVNGYWFLEQHDSWQPPDDLKAFLEAGAPPIYIGFGSISGSQPQRLAKVVLEALQTTHQRGILATGWGGLQTGDLPKTVFQLEQAPHDWLFPKVSAVIHHGGAGTTAAGLRAGRPTLICPFFGDQPFWGKQIYTLGVGPKPIPQKQLTISKLAEAMHELVSNQTLRHNAETLGEKIRAEEGVGNAITLLETLFSSQPLGRY

SEQ ID NO: 7990 - protein, 1449 aa, Gymnopus luxurians
MSDEPASRPTSPAPARNVRNALDKLSKSPKRMLSLTRKGKLRDTTTTTTITMSNDDSPFISPPSPPLSPSAAWPGDASMRVGTQTLIQALQALPWASDQDHDDDIAIHDPSALTEEPEGVSSDDESSPPHLASSIHTIYRPVARSRRMSITTGSRSRLPIPESSDETAQSEEDSEPEAEDFEDTTPKPPEAAEPSHLQLRSVSYMSQRQLSSSKLPERVAMTRSGSMATVKQERRTKLAEKLREIFELEDIEEVHAELPCWLLRSVLLQGYMYLTNTFLCFFAHMPSREDQVLKSGSLSKKAQRTKRWIKHWFVLKNDALSWYQSSSDPYFPHGIVDLRYAISCESTGDRGFRVRTNQKTVILSADSVPSREEWVKAIRKVIFKAQNTGDSVKIAIPYSAILDVEKSSAMDFSETIEVKVYDKEARDHFSIDSFFFAYFRDLPAALDQIRDAVRSRRTEGETTHHVLDTTTTRTLPFPVPEKPSSNIPSGSTSLFKIPSFIRPFSEPRIHTSLSTSSEQPHEEFTHITKRAHSSSFVPVTSTPSPRKSPDVKGVTEETGDSNLTPTASTIVIDSSHTYPPSTLGSPVSPLHPGSVRSSLGTNSMILSPTTSSSSGSWTAAVPSWLRVPTRRGLFSGGGVTSSDVLSVIPPGGKVKELYTSPTSTSHPASSWSSSSKFASAGAGAGAGDLTYSILETPNLPVDDEIATKFRNYFAYDEREILLGHFPGYIFRLLPVYGRLYISLNHFCFKSSGPLTSRTRMALPIRDILSVEKSKATRFGHHGLIVIVKGHEELFFEFGAEDKRDAFVLLIERQIEDVRRRLAEGDSLAAGGGETGMSQGQKDALILEELDVHHSPTHHVGPTHGHGHSSSSGYGSGPENNSSNLADSVPAMMFTSASSTFLTFKPKQSMHFTFLTIGSRGDVQPYIALAKGLQADGHRVKIATHKEFKEWIESHNIEYGYVGGDPAELLSLCVENGTFTVAFLKEGLLKFRGWLDDLLKTSWEACQGTDVLVESPSAMGGYHIAEALGIPYFRAFTMTWTRTRAYPHAFAVPERKMGGSYNYMSYVMFDQVFWRAISGQINRWRRNVLQIESTSLDKMEPHKIPFLYNFSPHIVPPPLDWPEWIRVTGYWFLDDADVSSKKWTPPGDLIKFIDSVHSADKKVVYIGFGSIVVSDPKAMTKCVIDAVVQSGVYAILSKGWSDRLHVKSPDTGEVEDPLPPQIYPINAIPHDWLFKRIDAACHHGGAGTTGASLRAGIPTIIKPFFGDQFFWADRVEALGVGSGVRRLTVESLTEALRNATTDQKQISRARVLGEQIRAEKGVETAIESIYRDLDYARSLIKRRNAAPESDGDDTDNEHATVRDRHPLSSASEPRSGYSSSGSVQGAPSEDWSVISDSRRSSVSSAHSGTSEPGSNSGKRSTIAAAMLSVLPNSLTPGSPRKRTLSANSQS

SEQ ID NO: 7991 - protein, 802 aa, Botrytis cinerea
MADSKLYEQEHNQADSPPSYGEATLSDTLLFSQTTKARGRSPCDIPSENRPWAVKLNIVIQVVGSRGDVQPFIALGNELQKHGHRVRIATHDQFEDFVRQANLEFYPIGGNPAELMAFMVKNPGLIPSMQTLRSGEIQRKRATISEMLEGCWRSCFKPDMISAEPFVADAIIANPPSFAHVHCAQALGIPLHLCFTMPWSPTAAFPHPLANIKTSSVDVGTGNYLSYLLVEWMTWQGLGDIINSFRERIDLEHVPYSEGPTLAVSLKIPFTYCWSPALVPRPIDWPPHIDVCGFFFRDTPVYTPPPELDAFLRMRGPPVVYIGFGSIVIDDPEALTGTLLDAVHALGVRAIISKGWSKLGGADFEDIFYLDDCPHEWLFQHVSAVVHHGGAGTTACGLSNGRPTMVVPFFGDQPFWGEMINAAGAGPTPVPFKSLNTKNLVEGLKFCLTKEAAIAAGKIASKMVKEDGVKAAVRSFHANLPLEDLRCDLLPDKPAAWRYKHKEKTIKLSKFAMQILLENNRLDQENVKLLETKHIDILHRRWDPVTAMASAYIGIATDIVQAQVGVFTKPYEEYKKAQAQNKSRKIVDESLSKQDPEVSDSHSLPGGNGAMSSSSSIHSTNSHNKKSGTAGLMARASGKSAGKMFVATGKGFFVNVPLAMADGMRAMPGFYGDKAKDCGNVTGWKSGMAAGGKAFSYGIVGGLADLVVQPYKGGRKEGALGVAKGIGKGTLGMISKISGGAVGFYAYPAQGIAKSISNTVHTTKKKEIQAAKREEGAWLIQEGRLTNEDVKVIIDVFEFIKI

SEQ ID NO: 7992 - protein, 1468 aa, Colletotrichum fioriniae
MASPAPAGAASVSFGEDDVKKRVGKKLQKKRHESNTPAMELPERLKEGDDSREEDLVPQQGPPMFMNMNQSIFGLIAAAGSRVDFHDRFESSDEESADEDEPTRRHGADKLDGGDDKVHGGIGHLLHRKQRRQNDSDLSKTTVLKKDSSSKTEKHRRKISGSKLLRSLPALPRLPRHKSKKEPSKLEPTSEEASDTSEPSPSQPADDTREDDDQDGHRLAPVMSRMLEAKAEMSARPSFDVDRRSSDQLNYSDSGDSNSTALARRLQDIFEFDHPEAVIEEYPCWLLQSVLLQGYMYITAKHICFYAYLPKKAHEVVKSGYLSKSGKRNPKYNRYWFRLKGDVLAYYKDPSNVYFPSGQIDLRYGISASVNNNKDGLTFTVVTHHRTYHFRADSAPSAKEWVKSLQRVIFRSHNEGDSVKISLPIENVIDIEDTQMLEFADTCKIRVIDNDETYAIDEYFFSFFSFGKDAISVLKILIEDASSSAKDAALLKAAQAQEEQERQERQPVPASARSSMSASRRMAPPKLRTTKLPDAVKATLSPLSAHSPSTLSPRASMDAARASFDAFRGFRRRSLDLSTIIRDSSPRRSFSGNRRSMSRNRLDDSRHGTHKQGSTDSYVQSSMEDPSYSGMVASSNEDPSASQILRGSDVFQNPTVRRSASASRTELEKNQRRDNRSPPALAAYSGQHAATTGSINDGDKPPVTPTLQSITKMGAFPLQRVGAFAQYLNSTSGKLGSMLATESMGYVEKVSGMWRGGRKHYDAPPEIKTDDEDLYEDAEGKIQTSMDRFRAHFALPETEKLQATYFGYILRVLPLYGKIYISDKSFCFRSLLPGTRTKLILPLKDIENVDKEKGFRFGYSGLVVVIRGHEEVFFEFGQAELRDDCAVTLLQSLETTRYLKESGDLDLDEKEEEENAMAERDALKEARQVEEFHDHELRLPKEGSGVSDAPTILFDDPKASFLNFKPPHSMKITCLTIGSRGDVQPYIALCKGLIAEGHKPRIATHAEFKDWIEGHGIEFAKVDGDPGELMRLCIENGTFTWAFLREANSMFRGWLDELLVSAWEACQGSDLLIESPSAMAGIHIAEKLSIPYFRAFTMPWTRTRAYPHAFVMPEYKMGGAYNYMTYVMFDNIFWKATAHQVNRWRNNTLKLPNTSLEKMQPNKVPFLYNFSEYVVAPPLDFSDWIRVTGYWFLEEGTDFKPPQELVDFIAKARADEKKLVYVGFGSIIVNDTAKMTQEVIDAVQKADVRCILSKGWSDRVAKQGEAESAKDEPIIPPEIFVIKSAPHDWLFSQIDAAAHHGGSGTTGASLRAGIPTIIRPFFGDQFFFGGRVEDIGVGICLKKWGAVSFARALWEATHNDRMIVKARVLGEQIRSERGVENAIQCLYRDMEYATSLIKRKAGKHAHAEEDEDEEVEESWTFIGNDEPDPDMTTKKLSEMGALPGLPGDKPLGNRVMRVSPSPSQQPVA

SEQ ID NO: 7993 - protein, 762 aa, Fomitopsis rosea
MSDITTPSKDGGSWMVGVPSWLRMPSIPSRRTLTSAFGIRSGETRSMPESEGVSEVLSSNTGTGSRMSASSSSPNDFGYFSVLEAPTTLDGDSIEKFRSAFALDEKETLLGVFPGYIYRLLPVYGRLYVSTNFFCFKSSGPLTTRTRMILPIRDILSTEMSKAFHFGHYGLVIVVRGHEELFFEFGDEERRAAFASLLERQMEDERRRSPGTDTSGSTPGRHDTLILDEVGPRLPSDTAKKAMYDGSMSESLPAVMFNSASSTFLTFKPDKSLHFTFLTIGSRGDVQPYIALAKGLMKDGHRCRIATHGEFKDWIEAHGIEFGYVGGDPAELMRICVENGTFTVAFLKEGMLKFRGWIEDLLKTSWEACQGTDVLIESPSAMSGYHIAEALGIPYFRAFTMTWTRTRAYPHAFAVPGHKMGGNYNYMSFVLFDQVFWRATAGQINRWRRDTLGLGSTSLDKMEPHKMPFLYNFSPVIVPPPLDWPEWIHVTGYWFLDDADVSSKKWSPPADLIIFLDSARKAQKKVVYIGFGSIVVSDPKSMTRCVIDAIVRSGVYAILSKGWSDRLVDATDVAEPEEPLPKQIYPIASIPHDWLFQRVDAACHHGGAGTTGASLRGGIPTIIKPFFGDQFFWADRVEALGIGTAVRKLTVESLTQALVTATTDQKQITRAKAVGEKIRAEDGVGTAIEAIYRDLEYARSLVKGAAADDLQDDDGLDAEHATIRDHRQSLPSPEYSGARSGSSSISSAQDSPSDWSVISDQE

SEQ ID NO: 7994 - protein, 1413 aa, Gloeophyllum trabeum
MSTPEDSVLAEKDDELSTSKGLVQRAVDRLGRAKSIGSRTPSSTQSAVSVAPRRLFSLHRKGKSREESSGLTLGMSEGDLRGPQSPPLTPQGGPSDDSPFIRPPSPPPTSRLSRSMFQLFRGDGSIRGGTHAIIQALGAIPFTEDQETDDDLGNHHPTQVESDSEPDENTDTPMTSSLHTIHRPLDKSRRGATALRNVFSVRSESPEEEKERETLSSSETDDADFEVDTPRMPDYTPAGLTSSPISTPSIHRGRVDGPQSSITRSGSMATVRLQRRARLADKLKDIFDLEGIDEVVAEIPCWLLRTILLQGYMFLTNSHLCFFAHMPSRENQTLKSGSLSKKAQRTKRWIKHWFVLKNDVLSWYQSSSDPYFPHGVVDLRYAISVEPVKDKEFRIRTNQKTVLLAADSPSSRDEWVKAVHKVMFKAQNSGDSVKIAIPYSAIVDVEKSSALDFSETIEVKVIDRDDSVVDSYFFAYFHDLDTALEQIRDVIRKYRTVPQGSSPQPIMDTTTPRLLNVPSQPADQSAERTHSLPVADHLTRAYSAFRLPSIWPVGRTTSAPQQSQSTVDDNEDFTHISKRKSGSSFVPFTTSPKGEKSQLPSADSDGFEGSSHVSSSVSSNHTYPPHPSPSESFHAAGADHTGGLWGVPAWFKVPSKRMFTSSFVSESYPTSTSPSARHGELGFSVLDKPGAAVDADMQEKFRTYFAFDERETLLGYFPGYIYRLLPQPGRLYISTNYFCFKSTGPLSTRLRMILPIRDILAAQKSKAFHFSHYGLILIVKGYEELFFEFRLEERRRAFISLLERQMDVVQSQEGSNPSSPGRSDALILEGFGSRTSLVQTSDSRPPPESMDQSVPAVMFTSSSSTFLTFKPKESLHFTFLTIGSRGDVQPYIALAKGLMADGHRARIATHGEFKEWIEAHGIEFSCVGGDPAELMRICVENGTFTVAFLKEGLLKFRGWLDDLLKTSWEACQGTDVLVESPSAMAGYHIAEALGIPYYRAFTMTWTRTRAYPHAFAVPEHRMGGNYNYMSYVLFDQVFWKAISGQINRWRRNVLRLGGTNLDKMEPHKVPFLYNFSPTVVPPPLDWPEWIHVTGYWFLDDAEVGAKKWSPPPDLLEFIDSAHNAGKKVVYIGFGSIVVSNPKAMTRCVIDAIVKSGVCAILSKGWSDRLQVKNPGEAAEVEEPLPKQIYSIASLPHDWLFKRIDAACHHGGAGTTGASLRAGLPTIIHPFFGDQFFWADRVEALGIGTGVRHLTVEALTAALLAATTDEKQIARARQVGEKIRSENGVATAIEAIYRDLEYARSLVKKPHEEPDGEIATIRDVEPPSSSASGSTPERPSTAQSSVESVDGNASEDWSVISDGGMSDGPHSRPDMRRRSSLGAAVLNVMPNVMRRSSSPVTGNGSGQANLPRCR

SEQ ID NO: 7995 - protein, 366 aa, Micromonospora sp.
MATFKIPFVPVGPPWRRSAAPRPRAAVPRPSPAQVRQLAESSIGIQFEVLSAAARDCDAVVASTGLQIAARTVAEKRGIPYVFTAFCPAALPSPHHAPLPLPALGEVPAPASADNGELWAANQRHVNDTFGAPLNALRATIGLGPVEDVSAHIHTDQPWLAVDRTLAPWPDAADRTVYQPGAWLLPDERALPPELATFLDASDEPCVYVGFGSVAAPPGLLETAVKAVRAVGCRLVVSRGWAPLSLAVRAPDCLVVGEVNQQELFKRVAAVVHHGGSGTTTTAARAGTPQVVIPQVYDQHYFARRVSALGIGGAHSGAVPTVESLTAALSAALRPEVAARARAFAAAISTDGAQLAAERLTTTLRS

SEQ ID NO: 7996 - protein, 1509 aa, Apiotrichum porosum
MTDYGSDSLTASVTANAVPQVVPDTPDLAGTEEGRASPPPPSHADASPSSSSALVSDPVAAERASDPTETASPDSSGSRRPTISLLSRTLEDMSPFMDEPHKAYESPPPVTSPLPGANDDTRPKTASEATPPVRLPQPPRSSTFHGSLIREGSQDSLAGMGSIRVGTSALVSALTALPWDNDTDDDMSAADEDGDAHDTARMAKTSVLPTRPKIHRLNSSLHTIRAMDLPPFVDNDDDNTPVATKSSSHSFHPHRQKLHFPFKDNTIARRARSPSKTELDYQLARKKRSEGGGGYHSGEGSHDERSPLHSGAESEPVEQPAPSDTDVEPRPQETRPESLPDLQHTDTETRLSEHTKIIRKDKLAARLQQVFGLDEQEEVLEEMNCWLLRNFMLKGYMFLTRQRICFFAHIPVDENTVIRSGPLWKKSSQTKLSTKSWFVLRNGVLSWFESSNDPYFPKGVISLQYASTCDSVGGARFKVRTTERNYTFIADTVDNAAEWVKAINKVIFKTQHEGNSVKLIIPLDAVVDIEQSPTLEFAETIEVKVVDPDDSMSVESFFFASFPDTDYAYEVLQKLLQDRPSSTLPQVPSTTTLHATADNASDHSVPRPGSSASGQFGLPKIGTVLRPLGLGGEREGKASSDSRVPIAAPPKPTLPHSHSDTDFVTSESEASDYETSGPKGYPPKQSGPPPPSMEPASSWRGGSWIRNPAAKLFGTSPSSAELGKRFSINQDPPRRPSNVTVVVEGALPNSDDEASDHPSNHRLHPASTMSSTMTISSGQSKIPHSKSSQSGFETVDDNVSSKFHSYFALPEKEELIADCSGSLYRVIPVHGRFYISTNYFCFRSNHLLYKTKAQKAFRFAHSGLIVIIKGHEELFLEFSSSKRRNDCMSLLEDRMEALREGNLPSHTPDEFPETIMEDLDESLWRSGPSAASLPSPMFGSAASSFLEFKPEPMTIVCLTIGSRGDVQPYIALCKGLQAEGHCCKIATHGEYKDWVEAHGIGFASVGGDPAELMRLCVDNGMFTVSFVKESLGKFRAWFDDLLTSSWAACQGADLLIESPSAMAGVHIAEALQIPFYRAFTIFWRAMAGQVNRWRKNELHLDATTLDKLHADKIPFLYNFSPTVVPPPLDWTEWIHVTGYWFLDHADGPDRKAWTPPEGVVEFIDAAHARGKKVVYIGFGSIVVSDPHEMTRCVVEAIVQADVCAILSKGWSDRGNEAASKGNKDGADGIEYPDSIFAIDAIDHSWLFPRIDAACHHGGAGTTGASLRAGIPTLIKPFFGDQAFWAERVESLGVGAAIRKLTSESLATALREATTNERQITRAKAVGEAIRKENGVQRAIEAIYRDLEYAKAIIKPLPGASDTSLVRKVSHFGLHSVPPGTPRKSKSLREPRSEGHGRAHGHSHSRSRGISTDREGGPGSDESWSVVSDSGHASQMNSPAIHISQLHDGGSDPSTHSCPTPAEGGSGSGGAGRRESSFAALGNLMGHWLPKSATPRGPPTPEPAETSEDK

SEQ ID NO: 7997 - protein, 1462 aa, Zymoseptoria brevis
MANKTDKQAASQASALATSSSTSALAPIKSRTASRTHAPRIPSPEPQRLSLDLPERFRFDSAEEDDVDDGTGVNEDDSRIGKGLFPQHSIYGLLAATQPSLGPQATSPSKRGGSSIKSRIGRTGLGAGFGIDRESDSESGSDDGNQVEDEDIRNVAAGTASRAAKPRSGHRKRLSENKLVRKVLRPICERADSQDLMTQSQFLPPRKKMAEDSEKQRISPPRKKSSSATDLKREAAKPSSPITIKQSRERSESPEPPMVHEEIDDEPKSLPTVLAQMFQFEQEEEVIAEYSCWYTVNVLLQGKLYITGKHVCFYAFLPKRHNKIIKTGHIGKVGKHSYRYLRYWFLLKGETFSYFKDSHDPYFPLGVVDLRNGISADITTKAGEDTTEFTLTTQTRVYKYKADTPGSALEWVKQLRKVMFRCHNDGNAVKVSLPLENIVDIERTGVVKAAETIKLRVVDNEETFAVDEYFFTLFQSGDEAWNMLKDLTDGNNAKQMGSDAALQDARPFGKTKSQKSEKSSTLNKDRYLVAEPVRTTLSRPNIRAPSSPRRSIEQQRSSTEASRRHSGETSRASVGRGRRSVSATSRTSLDASRVSRSPLSPVNQESESESLTMSSERTTGDEIDASMSASQMLSNDVVFRGPTLRPSHSRQTVSGATVEKLPKESEDLSSSRESSRERLPVRPSTKPRTEQALPVLHRSESSGSIKTLTANDKPARLTQGLMIRGISTPLQHAMNVAGMVHTTSKRMSSYLSSSPKDYLGKFSGALAGGKIQYDEVEDLTPDDSVRDTERDASGLTAEDRFQRHFGLPPTEKLTCAFYCCLIKTVPVYGKIYMGSRHFCFRSLFYGTKTKIVIPYRDIINVQKQRGFRWGHPGMCLIIRGYEELFFDFSNKGLRDDCAIRSLRILDAMRNLAEDPALLTDDELRDAAEAAAENNTLQTAKKQNLNTNELQMAVDATNDDPDAPPILFDDDLSSSMLDFKPKEPMNITCLTIGSRGDVQPYIALCKGFIAEGHRASIATHAEFGDWVKSHGIEFKEVAGDPAELMRICVDNGMFTPAFFMEANSKFRSWLDGLLITSYEACKGSDLLIESPSAMGGIHIAEALQIPYFRAFTMPWTRTRAYPHAFAVPGRKLGGVYNSATYTIFDGVFWQAMSGQINRWRRHTLDLPPTSLSRLQQDKVPFLYNFSPSVVAAPLDFADWVKVTGYWFLDEGTKYSPPPELADFISRTRAEGRKLVYIGFGSVTVADSRQLMQQVMEAVRKADVNCILSKGWSDRFSKTSSTPDAPLPDCIHQIRSAPHDWLFTQVDAVVHHGGAGTTGASLRAGKPTIIKPFFGDQWFFANRVEDLGVGSHLKKVSANQLGKALWVATHDARMMEKAKVLGEKIRSEDGVGEAIKAVYRDMEYARSLVTVKKQGVKKGGKGWWAGGVWGADGDEVEGEEGGDGGEEDEMWELVDDEKESEAEE

SEQ ID NO: 7998 - protein, 1564 aa, Pseudozyma hubeiensis
MHPRTLATIASSSRAGSPRISENEASTSTSQATQPNEADLDPFTVEDEDGERPQVPPPVQVPVDLDTPPLPTSPRLDPWTPRDISTISSLAGSRELGRPALEPITRIFAPNSASSQSARQSASTVNEPAVDVDQHGVADVAFHAEPQGLMQMLSLVGSTFFDADGEGYREDDEEESEQPSYQPATASTNLYRQTILDDAIGDSPTDESQPHVSDHTKLILDRTAKGRLQALARDDVSDDGSTPQGSRSPLDASVATIGPKRSKRTSLTHSEIISSSRDSTATRTTRRPGNPRSHLHNVASASMFGSTSKLAGDADDDQHGSRSIYGSSPPDQGSTDTQQARLSQQPSVVRLPSDAGQPIDRDSDPLLIRPYQTASPSRLATVDVSDSARIRLLHQLKEIFQLDTAETLLLAQPCWLFRSLLLQGHLYLTSSHVCFYAYLPSRDEKTVKTGLLGKRTRRTHRFSKHWASLKGGKLSWHDSDRDPYFPQGHIDLRKVSAVEPSTSHKDRFKVTTPARRFTFLAEDEHSRDAWVTALQKETFRAQNQGDSVRISIPLETVMNVETTLSVEGTEMVCITVVDEAGDFSVDEYYFLHLTKPSAFISGLTALLDQMGRASVASLQGGDQALNLSRLSIRDSTGATHATSISRKSLEEVPVLAKVLVPSQPGDQDARRGEAEGTKISQTEPAARAAAGLIWRQSADQGDESTGSASTAAAAVAIPVSVRGTSQEGSTDAVLSTTPRAAALKRLSTESSHTYPPSPSASDPPSSFDDVQKEAERGWAIPDWLKAAPARVLGRVTDSTSAASPAKTPWKDPGTRRRRRVLEKWSDEKGDDVSRGESSNTDNDDDTLSHSMHSTQSSYSILDADDGAAAAPDHTSVAAEFRDTFGVGDNEGLIGHTHAYLYRVLPIAGRFFVGEHHLAFRSSGIAAKTVGRTLMLVPLQEVISAAKHVAFRPGHHGMVINISGHEELFIEIASAHRRDELLSLIEYQLELLRGGRGSRASRESATRERSHALVLRDLSERIHDGAAATSLASSADSSMLSPTGSALGGKSSNLSQLGEGSSVLSFAPTAPLTFTMLTIGSRGDVQPYIALAKGLLADGHRVRIATHAEFGDWILGHGIEFSEIGGDPAELMRICVENGTFTVSFLREGVTRFRDWLDDLLASAWRACQGSDVIIECPSAIAGIHVAEALQVPYFRAFTMPWTRTRAYPHAFAVPNKKAGGNYNYMSYVIFDQMFWRASAFQINRWRKKQLGLQPTNFDKLEQHKVPFIYNFSPSLVPRPLDWFEWIHVTGFWFLDNPDNSESKKWEPPGDLVAFIKRARDRRRKVVYIGWGSIVVPDAVAMTKCVLQAVEKSGVCAILSKGWSDRLSSDRSAATDLGVGEDVYQVTSVPHDWLFPQIDAACHHGGAGTLGASLRAGLPTVVKPYFGDQFFWGQQIESLGVGSCVRHLTVDTLAQALIKATSDKKQIERARRLGEQIRGEDGVGTAVKVIYRDLEYARGLVKKDTRIEGSAKGRNVAESGKDGGLEVEKTQEEDEGHTSDEWSDIGGGEFSPRGSEGPSSSLILG

SEQ ID NO: 7999 - protein, 371 aa, Haloterrigena turkmenica
MAKTNVVAAFTDLYRPTVNGVTYTVALWRERWTRRRGSMAIVFPEMDGYEPGDGEYALPSVGAPLYPRYRLGVPVAPDGLDTPDIVHVHTPFTVGFAGVRFARERDVPVVATYHTLLEDRVNQHVPDGAVEPLKRVCRAYERAFFERVDHVTVPTSFARWHLLERVGADIDATIVSNGIDVDFFRPVESTPVRERYGLSGEGPLLGYTGRHGPEKNLEEAIDAVDGTDWTLVIAGDGPARDDLEGRAAATDADVRFLGFLEREELPAFYSALDAFVFPSPVETQGLVALEATACGTPVVAADAGALADGVIEGETGYRYAPGDREAFRWAIRRTLAERERLSDLCRRRRDMLAVDHSLEQLAALYDAVRDD

SEQ ID NO: 8000 - protein, 404 aa, Leifsonia sp.
MGADTFSPDVNGAARFAERLASGLAARGHDVHVVAPAASRKHGTWTETYEGQDITAHRLRSYRWYPHDWLRWAVPWRIKQNSARILDEVKPDVVHFQSHIVTGRGLSVEAEKRGIRIIGTNHFMPENMLEFTGIPKPMQEWAIGLAWRAARRSFVRAEAVTSPTKKAAEFLEKYTGLTGVHAISCGIDADNYTPDFEPRTANRIVFVGRVTGEKQIDVLLRAMTLLPADLDAQLEIVGGGDQKKNLEHLAETLGIADRVTFTGYVTDDELRQAYTRATVLAMPSIAELQSIVTMEAMASGLPIVAANAMALPHLVHDGENGYLFTPGDAADLADRLERVLRAPAEQLNAMKSASLKIVAAHDIKRTLSTFESLYRGEPVADPVMDAGSPVPTAEKRPGGGSSAG

SEQ ID NO: 8001 - protein, 385 aa, Natronorubrum texcoconense
MTYPQITVFTDSYLPTINGVTYTVRNWRDRWLERGGRMAVVFPNAPGYDPRVGEHAVRSVPFPWYDGYRLGWPRVPASHDLSRADVVHTHTPFGLGLAAQRLARRADVPLVASYHTPTAEYARYLLPSDRLRSVEGLARRGALAYERRFYDRADVVLAPSETTRRYVRESIGISTPVRVVPMGVDLERFRPVDTSAFRDRHGLDRDTPLIGYTGRHGHEKRLEDLLDAVAGAADRTDTPLESATLVLAGDGPARPSLERRAAALDFDVRFLGFLDRSELPAFYSMLDVFAFPSPVETQGLVALEAIACGTPVVGVDAGALAETVSGGETGYHYRAGDLTGFRRVLERALDERSELASQCLERRESIGLERSVDRLRDAYASVSGR

SEQ ID NO: 8002 - protein, 373 aa, Halobellus sp.
MPPASVAAFTDTYLPTVNGVSYTIQTWRDRWRDRGGTMDVVYPGSDAYDPDDGEYPVGSLPFPMYEGFRVGTPRVPGAVEDVDVVHAHTPFAVGLGGVRLARREELPLVTSYHTPTAEYADYLTSRPRVERGIERIAERYERWFLSQADAVVCPSEDARERAVGNVAVDTPAVVLSNGVDVEFFAPTDAAAFRERYGLPSGPLVGYTGRHGYEKNLAEFLRAAAGVDATVVVGGDGPARDDLETLAGELDLDARFLGFLPREELPAFYSALDAFVFPSPVETQGLVALEANACGTPVVAVDAGALSNTVDDGVTGYHYTHGDVDGCRDAIRRVLDDRASLAESCLARREQLSVEHAVERLSSLYADVVEKTQS

SEQ ID NO: 8003 - protein, 673 aa, Amycolatopsis benzoatilytica
MTIIAICLAVVGAAFFSVGALLQHRVVAGLPGQPRIGLLVRSPRWLGGLALLGSGAGVHAVALGMAPLSVVQPVGVLAVAITAVLNRRWRDLPAVALTTLGVGTFVTVAADRASTTPVSADAQLRAAFLVLGIVALLTITGAVSSRPAVRGMCFGAAGGAAYGFVSVLMRAVSLEIREGTVSFATAASVAAMVVALAVGGWLVQLAYRCGPPHAAVACLTVVDPLVAVGLGAGVLGEATHLDGGETAVALAAAVLAVGGIAVLSRTGTTPVHFSRSEHPVNDDRALRIVVAAETYPPDVNGAAHFAHRLATGLAGRGHQVHVITVDPAGVARTERAGDVVVHRVRSHRTPFHRTFRIGLPWEVSKDVAVLLDELRPDLVHVQAHFVVGRYVLKHAAAMGVPGVATNHFMPENLFGHLRVPTWLRGAASRWAWRDLTRVFSTARVVTAPTPRAVELLHENGFPERAIPVSCGIDIDRYRLRTFSRVSDGPTVLFVGRLDEEKRVDELLRALALVPDLRAEIIGDGSCRAQWEALAGDLGVAERVRFRGFVSEEDLLDAYAAADVFCMPGIAELQSLATMEAMAAGKPVVVADAMALPHLCRSGYNGWPFQPGDVGELAARLHAVAADPETRARMGAASGKMIAAHAVETTLDSFEACYATAMGRAERVPAARAA

SEQ ID NO: 8004 - protein, 407 aa, Nocardiopsis alba
MAQSARPLNVLIASDTYPPDVNGAGYFTHRLAEGLAERGHHVHVLCPSDEGDPYVTVNGAVTEHRLRSAPIPFQQHMRAALPLGMGGHITRLLGRLDPDVVHTQSHFTLSRSALRRARAVGIPVLLTNHFMPDNLYAHARVPRPMQRVAGAAAWRDMVRVAAEADHVTTPTPRAAELLREKGYAREVEAISCGIDLERFHPRPRDRARARLRFGLPDRDTVVFVGRLDEEKRIGDTVRALARIVPERDAQLVLAGTGQCEEELRALAAGLGVGDRVFFLGFVPDEDLPLVYAAADAFAIAGVAELQSIATLEAMSTGLPVVAADAMALPHLVEEGRNGFLFPPGDDALLAERLVTVLGPERSRFGAASREMALGHDHRRSLERFERVYESLRGRGTLRASSHRSLVA

SEQ ID NO: 8005 - protein, 433 aa, Marinactinospora thermotolerans
MTALPPSPQTSPGRPAGPALRILIGTDTYPPDVNGAAYFTHRLAVGLAERGHDVHVVCASADGPPHVERAEGVTLHRLRSSRVVPHSPMRVAVPLGVDGHLSRLITRLAPHAVHSQSHFTISRAVIRRARAAGVPVVLTNHFMPENLFAHAHIPPRLQAVSARLAWRDMMRVGLQADHVTTPTERAARLLREQGFARPVEVLSCGIDLERFRPRGQERAAARVRLGLPERDTIVFVGRLDEEKRIDELIRALREVLRHRDVQLALVGTGQREKELRALAQEIGVAGRVHFLGFVPDEELPLAYVAADLFAIGGIAELQSIATLEAMSTGLPVVAADAMALPHLVRPGRNGHLYPPGDVATLARHLLDVLESPSRRAEMGAASREIVLQHDQRRSLDRFEELYARIRPRRSGTSPHGAAPLTRVPLRRDNGMAA

SEQ ID NO: 8006 - protein, 442 aa, Halomonas ventosae
MNVLMFTNTYLPIVGGVSESVQRLKRQLQAAGHRVLVVAPRLSGQPRREDDVVRVAAMQHFNGSDFSLPVPIPGQLHEAIEAFDPDIVHAHHPFLLGDTAARAAETYGLPLVFTHHTLYEHYTHYVPGDSPRMQRFAVALATQYTWLCDEVIAPSESIRDLLLHREANPRVSVVPSGVDTARFAIGDGAGWRERLGIPEAAYVIGHLGRLALEKNLGFLAEAVSEALVREPGAHFLVVGEGEARGTIQALADARGVAGRLHFTGRLQGQALIDAYHAMDVFAFASHSETQGMVVAEAMAAGLPVVAIDAPGVREVVVDSRNGRLLAADDVDAMAGALAALADPGVRLPLAEAALATAAEYDEGRCAARCLAVYRRAIARGGPFTHADEGGWERMRHRLGAEWQMLRHRGRLLRHLVQEEWEQERPAWWPGHRAEDEREMPPK

SEQ ID NO: 8007 - protein, 431 aa, Kocuria rosea
MSAHTASAARPLTVLLGAETYPPDVNGAAQFGHRLARGLHEQGHRVHVLCARPDPGPSYRAEDDGVVEHRLRSHRAFTHPYFRLCFPWQVAGEIRRVLDEVRPDVVHVQCHYILGRMLVREARRRGIRTVATNHFVPENLEPFLPFPAWVLNRYRAVSWRDMVRVFGACDVVTAPTPLAVEAMRRNGFPDTVLAVSNGIRIADYEAHDGERRQPAAHPTVLFTGRLAVEKNVDVLIEAISVLPAELDAHLEIVGDGEQRPALEKLARALGVAHRVRFLGYVPDEGLRAAYLRADVFCQPGTAELQSLVTLEAMAASRPVVLADARALPHLAEDGVNGWLFAPGDAQDLARKLALVLGAPREERARMGRESRRKVAQHSFPRTLETFLRLYRGEHPESVRTPAPGAREHQESARAPAAGPRRIRTRLASLVR

SEQ ID NO: 8008 - protein, 409 aa, Nocardiopsis lucentensis
MAQTNRVLRVLIATDTYPPDVNGAGYFTHRLAEGLAGRGHRVHVVCPSDLGDPYVTANGGVTEHRLRSAPIPLQESMRMAVPLGIGGHTARLVARLDPDVVHVQSHFTVSRTALRRARAVGVPVVFTNHFMPDNLYAHAHLPQGVHSVAGSVAWRDMVRVAGAADHVTTPTPRAARLLREKGFARAVEAISCGIDLERFHPREGERAAARARFGLPDRDTVVFVGRLDVEKRIDDTIRALARVVSERDAQLVLAGTGQREQELRALAAGLGIADRVRFLGFVPDEDLPLVYAAGDVFAIASVAELQSIATLEAMSTGLPVVAADAMALPHLVEEGRNGFLFPAGDVAALAEHLLTVLGPDDRRRAMGAASREIALRHDQRRSLERFEAVYTSLGAAVPAPVRVERVIAA

SEQ ID NO: 8009 - protein, 439 aa, Halomonas sp.
MPRKARKPLSEAEIDQLMLLARGNAMARQLRAERAAAPTSRHLACHRGGDATLKILMISDVYFPRVNGVSTSVASFRDALERLGHAVVVLCPDYPVGQLEEPGVLRIASRGVPGDPEDRMMRLGELLALGPELEEAGFDLIHVQTPFVAHVAGIRLGRRLGIPVVATYHTLFEEYLHHYVRWLPQRWLRFLARRLAVHQCHQLDALVTPSHAMREALLRYGVTAPMTVIPTGLALESFAQPAEACDFRSRYDLPANARLLLYVGRTAFEKNIGFLIEMLPRVLARHPEARLVITGEGPAREALARQAREAGLADAVIFLGYLGRDGPLQAAYRAADLFVFASRTETQGLVLLEAMALGTPVVSTAVMGTREVLVEGEGCLIAEESHPDFAAKVNRVLADDTLRRRLAERGRVHAAGWHEDAKAAELVMLYRRQSLSVPE

SEQ ID NO: 8010 - protein, 386 aa, Unknown
  Description of Unknown: Clostridia bacterium sequence
MRIGFFTDSYHPYTSGVVRSLEIFQEELRCRGHQVYIFAPNYPDCPPEEDVFRFFSIPAVTQKNFTLAVPLSPTLSRRVKSLELDIVHVHSPFLLGSVGARWARRLGLPLVFTYHTRYEEYVHYFPFFPQVSRPVVRYYVRDFSNRCNLVVAPSGSMAEKLQGDGVRSPVTVVPTGIRYARLQGGEPGWLRHRYGIPEGVPVLLYVGRLAREKNLEFLLEAFQQILRQEPECRLVMVGSGPAREELVRRAARLGVAGRLVFTGVLPPPEVANCYQGADLFLFASLTETQGLVLVEAMAAGLPVVAVQAGGVTDVLQDGRQGFISQEKVQDLAAKALLLLRDPELRRQMGARARERAQEFTAERCTDRLLAAYNLVLTQETRFSRAG

SEQ ID NO: 8011 - protein, 404 aa, Unknown
  Description of Unknown: Candidatus Rokubacteria bacterium sequence
MAAEHQAGGFREVQQGVTDTPVRVALFTNNYLPFCGGVTVSVETLRAGLEAAGHEAWVFGPRLAAAADGSPRVVRYPSIPAATYPEFALAVPYSRRITRLVASLEFDVFHAHHPFLLGPAARRLARRRRRPLVFTYHTRYEKYAHYVPLRRPLVEALAVRLSTRFAARADAVIAPSAVIRDELQARGVATPIAVVPTGVDLSRFRPGDRGAARAALGVPGDDPLLLYVGRLDREKSVDRVLLAFERVASTLPAARLILVGRGTEAARLERLARSLPVADRIRFCGARPHAMLPSCYQAADVFLFASETETQGLVLVEAAACGLPAVAVSGPGCEEVVRDGDTGILTKGEPAALAEAAIGLLLDPARRQRMGARARGVALREFDVHFQIERTLAVYAAAALRMRE

SEQ ID NO: 8012 - protein, 386 aa, Saccharomonospora marina
MRVLIATDTYPPDLSGSSFFADRLAKGLAERGHDVHVVCASETGPRQDVRDGGVRLHRLRSLPLLIHPRVRFVPPPGVPLIVRRIVAAVRPEVVHTQDHFTIGRAAIRAAQRYDIPVVATNHFMPDNLLPYLPRRLHAPVADLAWRDFRRIYRRTDYVTAPTPTAAALLAEHGFARHVEPVSCGVDTVRFHPPADSAAAIRKELGLPDLPTIAFVGRLDAEKRIDELIRAFARLRHLDAQLVLAGEGTRRPELQRLAEQVGVGPHVHFLGFVPDEQLPSVYQAADVFAIPGIAELQSIATLEALASGLPVVAANAVALPHLVSPGENGFLVEPGDVAGLAATLDRILSYEELRRGMGTVSRSIAVSHGHERTLARFEEIYRAVTAG

SEQ ID NO: 8013 - protein, 380 aa, Unknown
  Description of Unknown: Candidatus Rokubacteria bacterium sequence
MRVALFTNNYLPFRGGVTTAVETLRRGLERLRHRAWVFAPASRPPVTDPPWVFRYPSIPAPTYPGFALALPFSRRLHGTARALAPDIVHAQHPFLLGPAARRFARRHGRPLVFTYHTRYEKYAHYVPLPERLVAALAVRLSCRFAGSADLVVAPSERIATTLRERGVTAPVAVVPTGVPLDLFRPGDRAEARRKLGLPADALLCLYVGRLDREKSVDRIIDAFGSVTDAIAGARLSLVGQGAHETAARRRAEASPARERIWFHGGRDRDTLPLFYRAADLFLFASETETQGLVLAEAHACGLPAVAVRASGVDEVVRDGETGLLTKAAAREFADAAIGLLLDGERRMAMGRAARAVAEREFSAARQVEAMVGHYGRLLQT

SEQ ID NO: 8014 - protein, 456 aa, Halomonas sp.
MPQRRRPYLSSPLSDPELAALTQLANGNALHLQREADRKARLASTLTLFHPAASTTNMPQSGMKVLMISDVYFPRVNGVSTSIASFHGALERLGHSVTLICPDYPVGQVDEPGVLRIPTRRVPGDPEDRMMRYRDLLALAPSLAGEAFDLIHVHTPFTAHYAGVALGRRLGLPVIATYHTLFEEYVHHYIRWLPRRWLRLAARRLSVHQCQQLDALVAPSRAMQETLTRYGVTTPSTVIPTGLSLESFCHPQGAQDDSDFRAHYDLPTDARLLLYVGRAAFEKNIDFLIDMLPKVLAEHPTARLIITGEGPAHDSLVRRAQEVGVAESVLFLGYLDRHGPLQAAYRAADVFVFASRTETQGLVLLEAMALGTPVVSTAMMGTLDVLKEGEGCLIAEDTHDDFAAKVNRLLRDNALCQQLAKRAQAYAASWHEDAKSAELVSLYRQIAAESLARGSK

SEQ ID NO: 8015 - protein, 436 aa, Unknown
  Description of Unknown: Brachybacterium massiliense sequence
MPLVRSEDACSPPRWKAGSVNVEKNRHRPRHLEEQHRPLRVLITTDWWEPVVNGVVASVQTLRRELIALGCDVRVLTLSQGIRPHHEPGVYRIGSVSASLVYERARIGMPSSRRVLKDILGWRPDVVHSQAEFSTYVWARRIARTLSVPLVHTYHTIYEDYTHYYSPSRTMGRKVVESFSRRALSAADAVIVPTAKVARLLDSYGVDRPLHVVPTGLDLNKFRPARSAEELEDARALRESLGIDARQRVLVSVSRLAKEKNLDEVLEMVAAADRPDTVLVLVGDGPHRPELEARAEALGIAHRVRFTGVVEPAEVQRWYRVGDVFVSASRSETQGLTFIEAMASGLPLLARRDPSLENVILEGRTGWQYEGSAQFAAQLDRLLGEPMRREQMAVAALEHAHATFGAQEFGRQALSVYQQARARRSPQIIRHELVAA

SEQ ID NO: 8016 - protein, 394 aa, Unknown
  Description of Unknown: Corynebacterium-like bacterium B27 sequence
MGADTFSPDVNGSARFAEHLASGLASRGHDVHVVAPSAKLPVGAHVEEYDGQKVTVHRLYSWRWYPHDWLTFALPWRIKQNSARIIDEIKPDVVHFQSHIIVGRGVSTEAEKRGIRIIGTNHVMPENMMAFTVIIPKFLQNWAIGLAWAAARRSFIRADAVTAPTRRAADFFEKATGIGNVYAISCGINVDNYVPDFTPRRENRVLFVGRVAGEKQIDVLLKAVQLLPADLDTKVEIVGGGDQLRNLQTMAQQLGLGDRVTFTGYVSEDELRKAYTRATVFAMPSIAELQSIATMEAMASGLPVVAADAMALPHLVHDGKNGFLFEPGNAQQLADRLEHILRLPQEELDVLKRESLSIVAAHDIQRTLTTFEHLYRGEPVTDPVVAPPAAEEHA

SEQ ID NO: 8017 - protein, 403 aa, Haloechinothrix alba
MNVTLPQQVAIRRQRRILIGADTFQPDVNGAARFAERLATGLAGRGHDVHVICPSTDTRSRTELFHGVIVHRLGSRRTPFHPSFRVCPPWRAGRDLDRIMSEVNPDVVHAQSHFVIGRALVNGATARGIPAVATNHFMPENLLGYLPLPHALGARAARWAWRDLGRVYGRVDAVTAPTPRAVALLRSHGFVHEARAVSCGIDAERYQNNGNTIAGTILFVGRLDKEKRVCELLRAVGLLADPDIRVEIVGDGACRAQLTELAEQLGIAGSVRFHGFIPEQDLLAAYARAEVFCMPGVAELQSIATLEAMSAGKPVVAADAVALPHLVREGVNGWLYRPGDVHGLADRLRRVLRAPGGSARLGAASRLLAGEHALATTLDQFEDVYSEVVTVPNESIASASTPE

SEQ ID NO: 8018 - protein, 430 aa, Unknown
  Description of Unknown: unclassified Cryobacterium sequence
MTNSGSLTLGQCLLSDLTDLPSESSPREPAKKPLRILIAADTFAPDVNGAARFAERLAAGMVARGHEVHIMAPAASRKFGTWTEVHEGQPMVVHRLQSWRWYPHDWLRYALPWFIPRETRKILDTVKPDVVHFQSHINVGRAVTIEAAKRGIRIIGTNHFMPENMLEFTLVPKGLHDRLIKAAWRAARRTYGRAEAVTTPTLRAAQFLERYTGLEGVLAISCGIDAHNYSPTFAPRTENRILFVGRVTGEKQIDVLLRAVVLLSPDLDVKVEIVGGGDQKRNLEHLSQTLGLSGRVTFTGYVTDAELATAYTRATVFAMPSIAELQSIATMEAMASGLPIVAANAMALPHLVHDGQNGYLFEPGNAQDLADKLTTVLMAAPDDLNALKNSSLRLIGVHDINRTLNTFECLYRGEPVIDAVTSDAAARGAE

SEQ ID NO: 8019 - protein, 423 aa, Nocardiopsis potens
MAAKSTTAPRERTDSGRGPGKEPRLRVLIGSDTYPPDVNGAAYFTERLARGLAARGHDVHVVCASTAGRPGVHRAGGVVEHRLRSMPSLVHESVRLALPPGAPGHLDRLLARLRPDAVHVQNHFLVGRLLLGAARRCGVPAVATNHFMPENLFNYLYVPGPLRSGIGRLAWRDFRRALAGVQHVTTPTRIAAQLLLDQGFDRPVEAVSCGIDLERFHPPGGGPGERARIRARLGVPDRPTFAFVGRLDEEKRIEDLIRAVRRVPVDGAQLVLAGTGAQRARLERLAEEEGVSDRVRFLGFVPEEDLPLVYRAADAFAISGIAELQSIATLEAMASGLPVVAADAMALPHLVHVGRNGYLYEPGSADDLAKYLGAILASAGERARMGAESREMAARHDHERSLDRFERIYRDVASRSAVLGSAP

SEQ ID NO: 8020 - protein, 395 aa, Microlunatus soli
MKIVIGADSYAPDINGAARFAGRLARGLAARGHEVHVVSASTEGPEQLEHDGAVTIHRMRSIRYRWHATMRVCLPWLAGPDARDLLEQLQPDVVHVQSHMVVGRAVANAADRLGIPLVATNHFVPENVFGYVPFLPRRFHGPAGRMAWRDLARVFGQADVITAPTPLAVSLLTEATGLSGEAVSNGIDVQRYQEAARQAELNADPQAGPVILFVGRLDQEKRVDELIAAFARIPAETGARLEIVGGGDQFDALVGFAAELGVDDRVSFLGQVSDEELLAAYGRASIFCMPGVAELQSLVTLEAMSAGKPVVAANAMALPHLVQSGHNGWLYTPGDIGELALRLSTLVADPRLRERMGQHSRTMVSHHDFEATLDTFTEIYASAGAAVRGQLRSVA

SEQ ID NO: 8021 - protein, 408 aa, Nocardiopsis salina
  MOD_RES (34)..(34): Any amino acid
MARARPLRVLIVTDTYPPDVNGAAYFTRRLPPGXLAGRGHRVHVLRPSAQGPPHVVEAVGVTEHRVRSARIPFQPSMRAALPLGLGGHVDRLLARYAPDVVHVQSHFTLSRTALARARAAGIPTVLTNHFMPDNLYAHARVPRSLQSAAGTVAWNDMVRIAEQADHVTTPTPRAALLLREQGLTRDVEAVSCGIDRTRFRPRTSERSTARRGLGVPDRDSVVFVGRLDEEKRIDELVRALALLIVDLDTQLVLAGTGQREEELADLARVLGVGDRVHFLGLVPDEMLPLVYAAGDVFAIAGVAELQSIATLEAMSTGLPVVAADAMALPHLVAEGRNGYLFPPGEVGVLADRLRRILGSRSERGFLGAASREMAGEHDHHRSLERFETVYARVVGSVPIRRGRRPVTV

SEQ ID NO: 8022 - protein, 391 aa, Pseudonocardia sp.
MKPLRILIGAETYPPDVNGAARFAERLATGLAGRGHEIHVVAPSPTGPAVREVHDGVVVHGVRSHRYYQHEGFQVCMPWETFPAVTALMNDIDPDVVHTNAHMVVGRGVVRAAHRSGRPLVATNHLMPENLIGYSPIPKPLQRVFNTWAWRDLGRVFGKAAVVTAPTPRAVELLVRRAGLVDAFPVSCGIDADRYRSVPHRPGPEPTVLFVGRLDQEKRVDELIRAFAALPDGMPGRLEIVGDGARREEWTALADTLGVAHRVRLRGFVSEQELLEAYAGADLFCMPGIAELQSLVTLEAMAAGLPVVAADAMALPHLVRPGRNGWLYTPGDVPELTTRLAALLGDAATRRRMGAASRDIVSAHAIGATLDRFEGIYDQVLGREQLTARAA

SEQ ID NO: 8023 - protein, 463 aa, Unknown
  Description of Unknown: Candidatus Aquiluna sp. UB- MaderosW2red sequence
MACDTFAPDINGAARFAERLAGGLVRNGHEVHIIAASQDSFSGMRIEQHDGVDLFVHRMRSHRVPQHASARFTAFWGLKRNIRRILNEVQPTAVHIQSHLLMGRFTLWALAGSGTRVIATNHVMPENLIKYSFLPKFLHNWARRVVWKDAGKILRKVDVVTTPTRRAAELLENSSGLSGVLAISCGINAARFANSTPTSNKNPMFLFLGRLDDEKRIPTMLRAVASLTEYPNIKVELVGDGSERGRLQVLARELGIEGRVKFLGHISDDDLPSTYERCTAFVMPSIAELQSIATMEAMASGRPVIGADAMALPHLVHDGDNGYLFPPDDVPALAERMKRILQADDQELLRLSENSLHLIRAHDIVRTVSIFEDLYRGIGEDAPTTADNEGSYSEPIGRLSESIRERLHEFRSDAERLRKRAGDLSHDAKERFGEVREEVREQLSEIRTEVERAAKKLRRKKDD

SEQ ID NO: 8024 - protein, 407 aa, Gulosibacter molinativorax
MKRANVVLPDLLESSRRMCVLIGVDTFPPDINGAARFARDHAVRLARRGHEVHVVAPATSMRSTSGVEIIDGQAIHVHRLRSVRWPLHDWLRFAPPWEVRYQVRRILRETHPAVVHLQSFIDIGRGLAIEAEQAGIPIVATNHVMPENVVEFSGLPKRLHPRLTRFGWNLATTAYTRADIVTIPTPIAADYLERHTGLSPIHPISCGIDTTRFTPKTAKPADARVLFVGRLDPEKNLTTLLTAFSLIPPGTGAHLDIVGRGSESGALRAQAAQLGISGRVTFHGRVTDEQLVSIHHAATVFVMPSPAELQSIATLEALASGTPVVAADAMALPHLVSNGVEGYRVPTHNAHDFADRIERILATDDDGYLRLSTAALARARKHDAATIITHYEKLYDTLTPSIASGAP

SEQ ID NO: 8025 - protein, 405 aa, Unknown
  Description of Unknown: Cryobacterium sp. N22 sequence
MAADTFAPDVNGAARFAERLAAGLVGRGHVVQIMAPAPTRKHGTWTEVHEGESMTVHRLHSWRWRPHDWLRFALPWIVRKQSRAILDSFQPDVVHFQSHIVVGRGVSIEAQKRGIRIIGTNHFMPENMLQFSLVPKGFQDQLVRALWKDAEHTFKRAEAVTTPTRRAAEFLEKYTGLAGVQAISCGIDADNYSPSFAPRTENRILFVGRVTGEKQIDVLVQAVALLDASLNAQVEIVGGGDQRRNLEHLVESLGLSAQFTFTGYVTDEELREAYSRATVFAMPSIAELQSIATMEAMASGLPIVAANAMALPHLVHDGQNGYLFEPGSAQDLADKLTRVFTRSPEELDALKHESLKLIEAHDIKRTLNTFERLYRGESTVDAHAAAQPDPSAARPPVLDVTPRRD

SEQ ID NO: 8026 - protein, 393 aa, Pseudoclavibacter sp.
MAGDTFTPNVNGAAKFTEHLASGMAARGHDVHVMVPAASRRHGTWTEQYDGQNITAHRLRSHRWWAHDWLRYAPPWRIRSESQRVVDEVRPDVVHFQSAVIIGRGVAIEAEKRGIRIIGTNHLMIENLVDHSLLPQALRGLAARIWWNDARSTLGRATAITTPTRRAADFLEANGGISDVLAISCGIRTSDYAFDFSSREAKRILFVGRVTGEKKIDVLLRAMTLLPRDVQLDIVGGGDQKKNLQSLAKQLGLADRVTFHGYLSDQELRRMYTRASVFAMPSIAELQSIATMEAMASGQPVVAADAMALPHLVHDGENGFLFEPNNERDLADKLAKALSLSDAEREEMGRTGLDLVRMHDIDRTLELFERLYRGASVKDVARDSVNEQDHSLD

SEQ ID NO: 8027 - protein, 397 aa, Pseudoclavibacter alba
MAGDTFAPDVNGAATFTEHLASGMAARGHEVHVLCPAASRRHGTWLERYDGQTITAHRIRSFRWYPHDWLRFAWPFTARRNARRVLDAVKPDVVHFQSAVVLGRAVTIEAAARGIRIVGTNHLMPENIMEHSLMPKVLHEPIAKTWWRDAAKTFARAHAVTTPTRRAARFLEQQGKVEHVLAISCGLRVSDYTADLSDKSPKRILFVGRVTGEKQIDVLLKAFAKLHAEMPDVELGIVGGGDQKHNLEKLSEQLGVADRTIFHGYVSDQELRSLYTHATVFAMPSIAELQSIASMEAMASGLPLVAANAMALPHLCHDGENGFLFEPGNVDELAERLRQVLTMSEDERAKLANKSLEMVQVHSMDRTLELFERLYRGESIESVARDSFNEQDRTLDH

SEQ ID NO: 8028 - protein, 418 aa, Subtercola sp.
MGADTFSPNVNGSARFSQRLASGLAARGHEVHVVAPAASRRHGTWTESYDGQNITVHRLRSFRWYPHDWLRFSEPWFINRNSERIIDQVKPDVVHFQSHIIVGRGLSIAARKRGGIRVLGTNHFMPENLLEFTLLPKSWQEKAISMAWKAAKRTFGRADVVTTPTQKAAEFLEKSTGLDGVLAISCGIDADNYVPDFAPRTENRILFVGRVTGEKQIDVLIKAVSLLPDDLDAHLDIVGGGDLLKHLENLTKQLGVDDRVHFTGYVTEDELREAYTKATVFGMPSIAELQSIATMEAMASGLPVVAANAMALPHLVKDGRNGFLFAPGDAQQMADKLEHILRLPQDELDAFKNASLAFIAKHDLVRTIVTFERLYRGASDVDVAAIDATMAAESLNTSSLRVIDLPAEPTAEPSDAAR

SEQ ID NO: 8029 - protein, 393 aa, Leifsonia xyli
MGCDTFAPDVNGAARFAERLAAGLVERGHDVHIVAPAASRRHGTWVEEHLGRKLTAHRLRSWRWYPHDWLRFALPWTSKANARRVLDEVKPDVVHLQSHIVIGRGLAYEAQKRGIRIVATNHVMPENIIEFTRLPRFLHHTFVSLAWKDARKSFDRAEAITTPTRRAAEFLEKATGLRGIHAISCGIDAHNYTPDFGSRTANRILFVGRVTGEKQIDVLLKAVKLLPDALDAKVEIVGGGDQFKNLQALAETLGIADRVAFLGYVTDEELRAAYTRATVFAMPSIAELQSIATMEAMASGLPVVAADAMALPHLVHDGENGFLFRPGDAQDLADKLKSVLTLPQDELDALKNASLRIVASHDIQTTIATFESLYRREQVADPVTEAAVEPATE

SEQ ID NO: 8030 - protein, 423 aa, Nostoc punctiforme
MFQNKKHRIALISIDGDPAVEIGQEEAGGQNVYVRQVGYALAQQGWQVDMFTRRSNSEQSAIAQHGPNCRTIRLKAGPAEFIGRDNLFDHLPEFIEEFQKFQQRQGFHYSLIHTNYWLSSWVGMELKKQQSLIQVHTYHSLGAVKYRSIGDVPVIAAQRLAVEKACLETIDCVVATSPQEQKHMRVLVSSKGNIEMIPCGTDTDKFGGIQRTAAREKLGIAPDAKIVLYVGRFDRRKGIETLVRAVAKSSLRGEANLQLVIGGGSRPGQSDAIERDRIASIVTELGLENCTTFAGRLDETVLPFYYAAADVCVVPSHYEPFGLVAIEAMASQTPVVASDVGGLQFTVVPEVTGLLAPPKDEVAFAAAIDRILINPTWRDQLGEAARQRTEIAFSWYSVGFRLTQLYTRLLAQTASNTRPRIAA

SEQ ID NO: 8031 - protein, 1053 aa, Solanum tuberosum
MAGNDWINSYLEAILDVGPGLDDKKSSLLLRERGRFSPTRYFVEEVITGFDETDLHRSWIRAQATRSPQRRNTRLENMCWRIWNLARQKKQLEGEQAQWMAKRRQERERGRREAVADMSEDLSEGEKGDIVADMSSHGESTRGRLPRISSVETMEAWVSQQRGKKLYIVLISLHGLIRGENMELGRDSDTGGQVKYVVELARALGSMPGVYRVDLLTRQVSSPEVDWSYGEPTELAPISTDGLMTEMGESSGAYIIRIPFGPREKYIPKEQLWPYIPEFVDGALNHIIQMSKVLGEQIGSGYPVWPVAIHGHYADAGDSAALLSGALNVPMLFTGHSLGRDKLEQLLAQGRKSKDEINSTYKIMRRIEAEELTLDASEIVITSTRQEIDEQWRLYDGFDPILERKLRARIKRNVSCYGRFMPRMAVIPPGMEFHHIVPHEGDMDGETEGSEDGKTPDPPIWAEIMRFFSNPRKPMILALARPDPKKNLTTLVKAFGECRPLRDLANLTLIMGNRDNIDEMSSTNSALLLSILKMIDKYDLYGQVAYPKHHKQSDVPDIYRLAAKTKGVFINPAFIEPFGLTLIEAAAYGLPMVATKNGGPVDIHRVLDNGLLVDPHDQQAIADALLKLVADKQLWAKCRANGLKNIHLFSWPEHCKTYLSRIASCKPRQPRWLRSIDDDDENSETDSPSDSLRDIHDISLNLRFSLDGEKNDNKENADNTLDPEVRRSKLENAVLSLSKGALKSTSKSWSSDKADQNPGAGKFPAIRRRRHIFVIAVDCDASSGLSGSVKKIFEAVEKERAEGSIGFILATSFNISEVQSFLLSEGMNPTDFDAYICNSGGDLYYSSFHSEQNPFVVDLYYHSHIEYRWGGEGLRKTLVRWAASIIDKNGENGDHIVVEDEDNSADYCYTFKVCKPGTVPPSKELRKVMRIQALRCHAVYCQNGSRINVIPVLASRSQALRYLYLRWGMDLSKLVVFVGESGDTDYEGLIGGLRKAVIMKGLCTNASSLIHGNRNYPLSDVLPFDSPNVIQADEECSSTEIRCLLEKLAVLKG

SEQ ID NO: 8032 - protein, 442 aa, Halomonas daqiaonensis
MNVLMFTNTYLPIVGGVSESVQRLKRQLLAAGHRVLVVAPRLEGQPREEHDVMRVMAVQHFNGSDFSLPVPIPGQLQEAIESFDPDIVHAHHPFLLGDTAARAAETYGLPLVFTHHTLYEQYTHYVPGDSPRMQRFAMALATQYTWLCDEVIAPSESIRDLLLGREANPRISVVPSGVDTVRFASGDGDNWRDRLGIPEAALVIGHLGRLALEKNLAFLAEAVAEALVRELGAHFLVVGEGEARSDIQALAEARGVAGRLHFTGRLQDQALIDAYHAMDVFAFASHSETQGMVVAEAMAAGLPVVAIDAPGVREVVVDGRNGRLLAEDDVDAMAEALVALADYDVRLPLAEAALETAADYDEARCSERCLAVYRRAIARGGPFTHADEGGWERVRYRLGAEWQMLCYRGRLLRHLVQEEWEQERPAWWPGHHAEDESEVPRK

SEQ ID NO: 8033 - protein, 384 aa, Kocuria rhizophila
MRILITAETYPPDVNGSAQFARRLAHGLLDRGHEVHVAAPMPTSGPSRTMTDDGVVEHRFRSHHAFTHPYFRLCFPWEIAREVSRLLDELRPDVVHVQCHYILGRLMVREASRRGIRVVGTNHFIPENIEPFLPFPQWFIRGYRKVSWWDIARVYGRCDVITAPTPLALRTMVDNGVPDRAVAVSNGIDAGHYEAAPDELIEHPEHPVVLFCGRLAVEKNVNELIEALALIPREKNVHVELAGEGEQRDRLLRLAHERGVADRVEFLGFLTDEDLRRAYLRADVFCQPGTAELQSLVTLEAMSASTPVVLANARALPHLADEGRNGYLFTPGDPADLAAKLQLVLDADPERRRAMGERSHEMVAQHSFARTLDTFQRIYAGASR

SEQ ID NO: 8034 - protein, 405 aa, Actinoplanes derwentensis
MRVLIGADTYAPHVNGASYFAQRLAVALTARHEVHVAAPSLGLRSHTVRTATGVTEHRVRSLPIPGHPGYRFCPPWTPSATAGRAGWGLRAEAARILDEVRPDVVHVQSHFPLCRALIEAARERGLFVIATNHFMPENLLHYLPIGTAGRANLHGWAWRDAARVFTGADIVTAPTPYAAALATLSGIPGPVLPISCGIDLARFRTEAPTADFRRAHGLAANPVITYVGRLDAEKHIDVLIQSFALIQRSTGAKLLLVGTGAEHRALTTLAGDLGVAEHVVFTGFLPDEELPSAYAATTVFVNAGTAELQSLVTLEAMASGRPVIGADAAALPHLVLDGETGYLFPPGDPAALADCLTRLLSDPVHAAALGRRAREVAEQHDATHTTAAFEHLYAIPQPTPAEVAA

SEQ ID NO: 8035 - protein, 397 aa, Unknown
  Description of Unknown: Microbacterium sequence
MAADTFAPDVNGAARFAERLAAGLVERGHDVHVVAPASSRRHGTWTETHEGQRMTVHRLYSWRWFPHDWLRFALPWRSRKNAARILDAVKPDVVHSQSFLVVGRGMTIEAARRGIRVVATNHLMPENLLEFTLLPRFVQEPAVKTMWRDARKILSLASAVTTPTRRAADFLERSAGRNDVHAISCGIDASLYHPVFEKRTENRIIFVGRITGEKQIDVLIKAFSRLDESLDAKLEIIGGGDQKRNLEALAQQLGVADRVTFTGYVTDEQLKTAYSRATVLAMPSIAELQSIVTMEAMATALPVVAANAMALPHLVHDGENGYLFTPGDEHELAARLTDVLTLDEKQLEAMKRASLRMIRPHDIQNTLTTFESLYRGEAVIDPVTDVSDVSDDERRGR

SEQ ID NO: 8036 - protein, 384 aa, Kocuria rhizophila
MKILITAETYPPDVNGAAQFGRRLAHGLLERGHEVHVAAPMPTRGASRTMEDHGITEHRFRSHHAATHPYFRLCLPWEIKREVARLLDELQPDVVHAQCHYILGRLMIREAARRGIRVVGTNHFIPENIEPFLPFPEWFIRGYRKVSWWDIARVFRHCDVITAPTPLAVRTMVENGVPDRAVAVSNGIEAGHYEAAADEEIRHPDHPVVLFCGRLAVEKNVNELIEALALIPREKNIHAEIVGEGEQRDRLVALAHERGVADRVHFLGFLTDEELRLAYLRADVFCQPGTAELQSLVTLEAMSASTPVVLANARALPHLADEGRNGYLFTPGDPADLAAKLQLVLDATPEQRRAMGTHSHEMVAQHSFAHTLDTFERIYAGASR

SEQ ID NO: 8037 - protein, 366 aa, Unknown
  Description of Unknown: Halobacteriales archaeon QS_3_64_16 sequence
MASVPHVAAFTDTYLPTVNGVTYTIRTWRERWDERGGRMDVVYPSSAEYAGEGGEFSVPSLPFPFYEDFRVGAPAIPDAVRDCEIVHAHTPFGVGLGGLKLARAEGRPLVASYHTPTSEYAGYLVEGWLREVVARVGDAYERWFLDRADRIVAPSETARKALRERGIGPVSVVPNGVDIDRFAPVEFEGFRARYDLPEGPLVGYTGRHGYEKRLSDLLAAAADVDATFVFGGDGPARESLEAQAAELGVDTRFLGFLDREELPEFYSALDVFAFPSPIETQGLVALEAMACGTPVVGVASGALVDTIAEGETGYHYPPGDVEAFEGALRRALADRDRLREVCLSRREAVSVEHAIDELESVYDDVR

SEQ ID NO: 8038 - protein, 419 aa, Agreia sp.
MSDSSGPRPASAEVPSTASSERPLRIVIGADTFSPDVNGSARFSERLASGMASRGHDVHVVAPAASKKHGTWTETYDGHDITVHRLRSWRWYPHDWLRYALPWVINQNSAKILDAVKPDVVHFQSHIVVGRGLSIEAEKRGIRIVGTNHFMPENLLEFTLLPKSWQDWAVGLAWKAAKRTFGRASAITTPTRRAAEFLEKSTGLTNVYAISCGINADNYTPDFTVRPKNRILFVGRVTGEKQIDVLLKAMTLLPDDLDAQLEIVGGGDLKKSLEAMAVTLGIADRVTFTGYVTEQELRDAYTRATVFAMPSIAELQSIATMEAMASGLPVVAADAMALPHLVHDGENGHLFAPGDAQQMADRLADILTLPQDELDVFKNASLRLIAAHDIQRTLTTFEKLYRGEVVTDPLIVSPSASHE

SEQ ID NO: 8039 - protein, 415 aa, Unknown
  Description of Unknown: Brachybacterium muris sequence
MLRPRPLERNVPRPERPLRVLLTTDWWEPVVNGVVASVSTLRRELEALGCEVRVLTLSGGMRTWSEDGVYHIGSLSAQLVYDHARIGMPANKHVLAEILQWQPDVVHSQCEFSTHVWARRIARTLGVSLVHTYHTIYEDYTHYYSPSRTVGRKVVATFSRRLLEGTDAVIVPTEKVSRLLRSYKVRRPIHVVPTGLDLQRFRPATTAEERADAAALRASIGVRPDQRVLISVCRLAKEKNLDEVLENLAAAGREDVVLVLVGDGPYREELVHRAVELGIAERVRFTGVVDPQEVQRWYRIGDVFVSASLSETQGLTFIEALACGLPLLCRRDPSLAPVVIDGVTGWQVEGTEEFRLRLDQLLDDDISREAMSGAAVEHARDTCGAREFGQAVLEVYRQTRTRRTPRILSRQVVPA

SEQ ID NO: 8040 - protein, 374 aa, Promicromonospora kroppenstedtii
MNGAARFAGSLATGLAGRGYDVHVVAPSPTGKPVREVRDGVVLHGLRSSRYPTHHNLQISLPWETRRAVTEILDEVRPDVVHTNGSFIVGRALVDTAHRAGLPIVATNHLMPENLVGYLLVPGSMHRTVGRWLWQDIGRVYAKADVVTAPTPRAVDLLAQHAGLSHAIPVSNGIDTDRYTTTVREGRAEPTVLFVGRLDQEKRVDEIIRAFALLPEDLPGRLEIVGTGAKADEWAALAAESGVAGRVRFRGYVPDDELLAAYSAADVFCMPGVAELQSLVTLEAMASGLPVVAADAMALPHLVRPGVNGWLYTPGDVRELANRLGDLLADAGLRRRMGAASRELVAAHAVDGTLDAFAEIYEKVHATRATAAAA

SEQ ID NO: 8041 - protein, 419 aa, Halomonas heilongjiangensis
MKVLMFTNTYLPIVGGVSESVQRLKRRLQDAGHRVLVVAPRLAGQPAEEPDVVRVAAVQHFNGSDFSLPIPLPGQLFDEIETFEPDIVHAHHPFLLGGTAARVAETYGLPLVFTHHTLYEHYTHYVPGDSPRMRRFAIALATEYTRLCDAVIAPSESIRDLLLERGANPEISVVPSGVDTLRFVMGNGSGRRERLGIAPEAYVVGHLGRLAREKNLAFLAEAVACALAVLPEAHFLVVGEGEARRTMAEIATVRGVAARFHFTGRLEGQALIDAYHAMDVFAFSSHSETQGMVLAEAMAAGLPVVAVAAPGVCEVVVDGHNGRLLAEDDAAAMAAALIDLAGVERRAPLGEAALATAAAFDEACYAERCLVVYRRAMACRPPFAQVDDRGWERVRSRLGAEWQLLRHRGRLLKHLVQEE

SEQ ID NO: 8042 - protein, 388 aa, Unknown
  Description of Unknown: Frigoribacterium sp. PhB107 sequence
MAADTFPPDVNGAANFAERLAVGMAARGHDVHVLAPAASRKHGTFLEQHAGVTLTVHRLYSTRWPLHDWLRFATPWRAEANAERVIRQIQPDVVHIQSHIVIGRAVVRVANRLGIRAVATNHFMPENLLEHTGLPHALRATAVKMAWADASRTYHRVESMTTPTDKAARFLEKAIDVEGVLAVSCGIEASNYTARDDRPEGNRIVFVGRVTAEKQIDVLLRAMTLIDPTLESTLTIVGGGDLMRHLQQLSVDLGLAGRVTFAGYLSDAELRRTLTDATVFAMPSIAELQSIASLEAMASGLPIVVADAMALPHLVDDGGNGWLFRPGDSADLADKLTRVLTSPDDEYLTMRRASLRMIEGHDIERTLNVFEGLYRGQPVAPTTDVVSY

SEQ ID NO: 8043 - protein, 362 aa, Unknown
  Description of Unknown: Candidatus Altiarchaeales archaeon sequence
MNIGIFTDTYFPQVNGVVYTIFEWKKRLQKFHDIYIYYPDSEYEPKKNEFPFRSYEFKFYKGYNIAFPTDISEKAKNLDMVHIHGLFTMAMAGLYVSRKFRLPKILTYHTPADDYINYITRKEPFRTTLMKLYNFWEKRLLNSCDIITAPSKTIKNRLIEKGVDKDIIILSNGVDLDFFHYTNPERFKEKYGINAERVIGFCGRFGYEKHLEDIIGIADDFDGDIIMAGKGPAQDYYMNMAREKKNVRFLGFLSREELREFYSSIDLFIFPSTAETQGLVALESMACGVPVIGANALALKDTIEDGKTGYLYEQGNIRELKKMIDKAYKNREVLSRNCLKSVKRHSMDNTIKRLLEIYESLV

SEQ ID NO: 8044 - protein, 382 aa, Unknown
  Description of Unknown: Microbacterium sp. sequence
MGCDTFAPDVNGAARFSERLAAGLVARGHDVHVVAPNRVYRRASPAVEQIEGEPVIMHRLPSVRWPPHDWLRFVWPWRSKHYARRVLDEVRPDVVHIQSHIVIGRGLAREAHKRGIPIVATNHVMPENILDFTTLPPVLDRLFVKLAWDDAARTFALTRAVTTPTRKAADFLEAAIDIDGVVPISCGIDAAKYTADLSPRDRHRVLFVGRLTREKQIDQLLRAVAALDPALDVDVEIVGGGDQRKHLEQLAEQLGIADRVVFHGRVDDDELRRIYTRASVFAMPSVAELQSIATMEAMASGLPVVAADAMALPHLVREGDNGYLFDPASIDELTAALTRVLTADPDERRRLQQASLDGVKIHDIDRTLRTFEALYRGEPVEG

SEQ ID NO: 8045 - protein, 372 aa, Halegenticoccus soli
MDAVVAFTDTYLPTVNGVTYTVQTWRDRWRARGGRMDVVYPAADGYEPAEGEYPIRSLPFPFYEGFRFGLPKVPESVRDADIVHAHTPFALGLGAMRLARRERRPLVASYHTPTGEYASYLTSRERLEDRIEGLSERYERWFFDRADAVIAPSGTARRSLLDAVGVETDVTVVPNGVDVERFRPVDAAAFRERHDLGGGPLVGYTGRHGFEKRLSDAVDAVAGADIDATLVFGGDGPARPHLAARAENRGVDARFLGFLEREELPAFYSALDAFLFPSPVETQGLVALEANACGTPVVGVNRGALADTIVEGVTGYHFEPGDVEGFAAAIERTLDERERLRDGCLDRRDGVSVEHAVDRLAEVYASVRKTKP

SEQ ID NO: 8046 - protein, 379 aa, Unknown
  Description of Unknown: Microbacterium sorbitolivorans sequence
MGCDTFAPNINGAARFAERLSAGLVQRGHAVHVSAPNVRYALEKPRIEKIEGEDLVLHRLPSVLWIGHEWLRFIWPWRSKHYARKVLDEVRPDVVHIQSHIVIGRGLTREARKRGIPVIATNHTMAENILDSTRLPEWGNKLFVKLAWDDARRTFNMVSALTTPTRKAADFLETTLGISGVIPISCGIDMHQYTAVIGPRDAKRIVFVGRLTAEKRVEDLVRATARIPDATLDLVGDGDQRDALAKLADELGIRDRVVFHGRVSDEELRAALTRASVFAIASIAELQSIATMEAMASGLPIVAADAVALPHLVSEGENGYLFEPENIDELVEKLDRVLGADDAAYEAMQRASLEMVSAHDITRTLDTFEALYRGEQIPA

SEQ ID NO: 8047 - protein, 419 aa, Rathayibacter toxicus
MSDSRDESRQVSADVGLAALTVLIGCDTFAPNVNGAAKFAQRLAAGLAERGHEVHVVAPSADGWNGTRYETHEGQRIVVHRLYSWRWFPHDWLRFAMPWRIRQNSARILDKVKPDVVHFQSHIIVGRGLGIEAAKRGIRIIGTNHFMPENMLEFTLLPKAVQAKAVQMAWRAARRTFDRAEAVTTPTRKAAQFLETYTGLRGVHAISCGIDASNYTPDFSPRTSNSILFVGRVTGEKHIDVLLRAVALLDPSLEATLDVVGGGDQLRQLQQLGAQLGIDDRIRFTGYVSDAELREAYTRATVFAMPSIAELQSIATMEAMASGLPVVAADAMALPHLVQNGKNGFLFEPNNAQALADRLTDVLNADEEAFSAMKRASLSIVAAHDINRTISTFESLYCGEPVADLAADAASDPARRSAS

SEQ ID NO: 8048 - protein, 426 aa, Microbispora sp.
MNALPLTSVPAAPEALPGAPVEEPPALAVAGARVPRLRVLIAGDTYPPDVNGAAHFTHRLATGLAARGGQVQVVCASPEGPARTETGDGVVVHRMRSAPLLVHPTMRVSLPAGLGRALAGLIARVRPQVVHVQGHFVVGRAAVRAARAAGLPVVATNHFMPDNLFQFGRVPARLRGRAGDLAWRDLTRVFARADHVTTPTRIAAGLLRDKGLAGDVEAVSCGIDLERFRPQPRPWAREWALRRFGLPDRPTVLFVGRLDEEKRLEDLVLALPHVLNHVDVQAVIAGTGGRRAGLERLAARVGVGDRVRFLGFVPDDELPRVYAAADVFAMPGVAELQSIATLEAMASGLPVVAADAMALPHLVAGNGRLYRPGDVQAMARHLTAVLTSDRLRAEMSTVSLAMAAEHDHRHSLARFEEIYRELAAEQ

SEQ ID NO: 8049 - protein, 436 aa, Unknown
  Description of Unknown: Nocardiopsis sequence
MKERTPGNAGQGSRPSGGPERLRVLIAADTYPPDVNGAAYFTYRLATGLAGRGHDVHVVCASATGRPGIEYEDGVVLHRLRSASVVVHPTMRTAVPLGVGGHVARIVERLAPHVVHAQSHFTVSRAAVRRARLSGAPVVLTNHFMPDNLFAHAHVPAALQGAAGALAWRDMVRVAYDADHVTTPTRRAADLLAAKGFSRPVEPVSCGIDLERFRPRPAERAEVRKRFGLEDRDTMVFVGRLDEEKRIDDLIRALAALKDRRDLQLALAGTGQRQAELARLADELGVADRVRFLGFVSDEELPLVYVAGDVFAIGSVAELQSIATLEAMATGLPVVAADALALPHLVDQGGNGFLYPPGDSDALAERLGEVLASDRRQAMGEASRALALTHDHERSLDRFEEIYRSVRPRRPGAPVADRALRAVAGTGERRRSPAAA

SEQ ID NO: 8050 - protein, 403 aa, Unknown
  Description of Unknown: Cryobacterium sp. GCJ02 sequence
MAADTFAPDVNGAARFAERLAAGLVSRGHVVAIMAPAATRKHGTWTEVHEGESMTVHRLHSWRWYPHDWLRFALPWIVRRHSRAILDSFQPDVVHFQSHIVVGRGVAIEAQKRGIRIVGTNHFMPENMLQFSLVPKGFQHQVVKALWKAAEHTFRRAEAVTTPTRRAAEFLEKYTGLTGVHAISCGIDADNYSPSFAPRTENRILFVGRVTGEKQIDVLVQAVALLDASLDAQVEIVGGGDQRRNLELLVESLGLSSRFTFTGYVTDEELRQAYSRATVFAMPSIAELQSIATMEAMASGLPVVAANAMALPHLVHDGQNGYLFEPGSARDLADKLTVVLTAAPDELDALKNESLKLIEAHDIKRTLTTFEHLYRGEPIDSPATATTESASSRQVLDGTPAHD

SEQ ID NO: 8051 - protein, 366 aa, Halococcus sp.
MPPHVAAFTDTYLPTVNGVTYTIRVWRDRWRARGGRMDVVYPAADGYDPDPDEHPVRSLPFPFYEDFRVGAPSVPDGVETADVVHAHTPFGVGLGGLRLVRRIDAPLVASYHTPAAEYAGYLAEGWLMDAVARAGNAYERWFLGHADHVVVPSEVARAELESRGIGPLSVVSNGVDIERFAPTTTDFRARHDLPEDRPLIGYTGRHGFEKNLSDLLAAAAGTDATVVLGGDGPARKTLETEAAELDADIRFLGFLEREELPEFYNALDVFGFPSPVETQGLVALEAMACGTPVVGVDAGALTETIDEGETGYHYRPGDIAGFRDTLGRALADRDRLAETCRSRREGMGVDHAVDALTDVYDTVGVE

SEQ ID NO: 8052 - protein, 415 aa, Halomonas sp.
MKILMLSDVYFPRINGVATSIASFRDALERLGHSVTLICPDYPVGQVDEPNVLRVSSRGVANSPEDRMMRYREVMALLPSLAVERFDLVHIHTPFVAHYAGTALAKRLGLPALATYHTLFEEYLPHYVRGVPSGWLRFIARRLSVRQCRRLKALVAPSHAMRETLERYGVKTRVTVIPTGLALERFSQPADEEDFRARYELPDNARLLLFVGRLAFEKNIAFLIDLLPRILAEHPDTRLIITGEGPARVELTRRARQIGMEYAVRFLGYLDRHGQLQAAYRAADVFVFASRTETQGLVLLEALALGTPVVSTAMMGTRDVLIEGEGCLIANEELDDFAAKVSRLLGDETLRSELARRAKHYATGWHEDAKGIELAALYARLCAKQGPQPNAVAELPAASVGAPPPLAPLTSRVED

SEQ ID NO: 8053 - protein, 396 aa, Galactobacter valiniphilus
MSAERPLRILIACDTYPPDLNGAAVFCFRLAKAMSSRGHEVHIVAARTDDGPSFVEHRPEATVHRVKSHKAPTHESYRLCLPVTANKVIAEVIDEIKPDVVHIQCHYMIGNAAEKQATKRGLRLIATNHFIPENLEPFLPFPQWFLNIVSKNSWRDMGKIMGRADVVTTPTPLAAREMRLRAGLEHVLALSNGIDSAKYEAHEGEEIAHPDHQVVLFAGRLAVEKNVDVLIRAMARLKGANPPHLRLVGEGEQRPKLLKLAQDLGVEDRVHFLGFVDDETLRAEYLAADVFCQPGTAELQSLVTLEALSASRPVVLANALALPHLVDEGVNGYLFEPGNDADLASKLETVLDLSPADREAMGAAGHAKALLHAEKKTMDTFEDLYRGAPAAKYMDA

SEQ ID NO: 8054 - protein, 391 aa, Actinoplanes rectilineatus
MRILIGADTYAPHVNGASYFAQRLAGALNREDGADVHVVCPADGVRSTTRVTADGITEHRVRSLPVPGHQGFRFCLPVALRRAAGRILDEVRPDVVHVQSHFPVCRALVDAACERGVPVVATNHFMPENLTHYLPVGDAGRQLVHEWAWRDAARVFAKADVVTAPTPYAAALATLAGVPGPVLPISCGIDLRRFRTATPAGEFRLRHGIPAKPTVTYVGRLDAEKNLDVVLRAFAEVAVDAHLVLVGAGAERHHLEELAEKLNITRNTTFTGFVPDDELPAAYAATTVFVNAGTAELQSLVVLEAMASGRPVVGADAAALPHLVVDDETGYLFPPGDHAALAARLRTVLADEARAQALGKRARQVAEQHDEARTVAAFQQLYALRAGVTVR

SEQ ID NO: 8055 - protein, 392 aa, Thermacetogenium phaeum
MKIGVFTDSYRPYVSGVVRSIETFSRELRRLGHEIYLFAPHYPQTKGEKEVNVFRFPSFHTPFNPEFYIALPFPRRVVRYASGLGLDVIHVHSPFMLGQAGARLARSLDLPLVFTYHTLYDQYLHYAPLAGKLAKRGIIAYARNFCNRCDLVITPTGVIREMLFGYGVQKPVVAIPTGIYPERFRDGDPDFLNKNFGVPPDKRVLLFVGRIGKEKNLAFLMRAFALVSRQVDDAVLVLVGSGPEEAALRRMAYTLGVGDRVVFTGRLPPEVVAGAYAGAYLFAFPSVTETQGLVLVEAMAAGLPVVAQAAFGSLAMVQDGVTGYLCRGGEEEFAAKVLELLDDSDLHRRMAEAAAQWAWKLSAEKMALRLEKAYLALVHGDHDRLLQMGEEW

SEQ ID NO: 8056 - protein, 386 aa, Thiothrix lacustris
MHILMVSDVYFPRVNGVSTSIQAFRQALQAAGHRVTLIAPAYASVTDAETDIIRISSRNVIVDPEDRMMRIRDIHRLTDTLRAGDYDIVHIHTPFVAHYAGLKLARKLKLPVVATYHTFFEEYLYNYIKWLPKEWLRYAARRFSRTQCADLDALVVPSAAMQQVLLHYGITTPLTVLPTGLDMNVFASGDGVAFRQQYGIEPERPMILFVGRVAFEKNIGFLLDMTAQLRERIPDILLVIAGEGPAEKGLQAQVARHGLQQQVRFVGYLPRDGGLQACYKAADVFVFASRTETQGLVLLEAMACGTPVVSTAVLGTSDIMHGEQGGLIAEEEPAAFAAQVERLLDDKALHARKVTEALAYAATWSHTAQAEKLLGFYQQVPTQHNR

SEQ ID NO: 8057 - protein, 391 aa, Tropheryma whipplei
MVHGKSLRVLIGTETFPPEVNGAAKFSGRLASCLIERGHIVRVVAPSRTRGRGGEYLEEIEGNAVLVYRLPSVKWPGHSWFRFASPLFVSRFCSKIIDDFQPDVIHYQSHFMIGLSLSKKGRARGVRLVGTNHFMPDNVIHYCEFLPTFLHKFLWKANWHYASRCFARADVVTSPTQSAANFLERYTTIENVVPISCGIDLSGYTPSFERGSVLLYVGRITREKQLDVLIRAFAKLNNKDITLKLVGIGEEVEPLRALAYSLGVSDRVVFCGYLEEGDLRKTYSEASVFVMPSTAELQSIATMEAMASGLPVVGADSMALPHLVRDGENGYLFSPGDPDDLASKLTAVIALDDADFAAMQRRSLEIVAEHEIDRTIDAFERLYAGSQVSCN

SEQ ID NO: 8058 - protein, 402 aa, Methylotenera versatilis
MKILFISDVYFPRINGVSTSIRTFVLQMQNLGHEVHLIAPDYDVVTEDEAWIKRIPARSIYFDPEDKLMKYGEAVKLLPALEQEKYDIIHVHTPFVAHYLGLKLAAQLNIPCIETYHTFFEDYLHHYLPWMPKSIARGIARMISKRQCNAVDAIVAPSNPMLDVLRRYGVNVLSEVIPTGLQDSSFAAADGQAFRLKYGIPLDRPMLLYVGRVAFEKNIDFLLEMTKILAEKRPDVLLVVTGEGPAEASLHKLAKTLEIEKNVQFIGYLDRNKELNACYESADIFVFASKSETQGLVLLEAMAQATPVVAIAELGTASILIEGKGALIAPDDTAQFAERVRQLLLNPEHRFELGNRAKNYALDKWTATLQAQRMIKFYEEVILSPSSPRQPYLKTQLDPVKG

SEQ ID NO: 8059 - protein, 369 aa, Halolamina sp.
MESVAAFTDTYLPTVNGVTYTVQSWRDRWQARGGRMEVVYPDAPEYEPEPDEHPVRSLPLPIYAGYRLGAPRVPDTVTDVDVVHAHTPFAIGLAGLRLAQKRELPLVASFHTPTSEYAAYLSSWGPVKKPTAALSRRYESWFLNKADAVVVPSESTGEYVATELGVDSPEVVPNGVDTERFRPVDPTAFRERHDLPTDRTLVGYTGRHGHEKSLPAIIAACDRLDREVTVVFGGDGPARAELEEAARKLNVDARFLGFLDREELPAFYAGLDAFLFPSPVETQGLVALEAFACGTPVVGVDSGALSDTVDEGVTGYHFEPDDVDGFADAIARTLDERERLRENCLDRRASISVEHAVDRLTEIYAAVRE

SEQ ID NO: 8060 - protein, 411 aa, Planomonospora sphaerica
MPSSAVSTAEPLPAGSPSAPGSSGTRPCRVLIGTDTYPPDVNGAAYFTHRLARGLARRGNDVHVVCASETGPARTEHVDGVTVHRLRSAPVLVHPTMRISVPARLDRLVAAIAPDVVHVQGHFVVGRAAISAARRAGVPVVATNHFMPDNLFQFAHVPEPLRDRAGDLAWRDFNRVFSRADRITTPTRIAAGLLAGKGFTRPVEPVSCGIDLSRFRPRKEPRAWARKAVDLPDRRTVLFVGRLDEEKRLDELIRALPYVLNGTDAQLALAGTGGRRASLERLARRIGVGDRVTFLGFVPDDMLPDAYAAADVFAMPGVAELQSIATLEAMATGLPVVAADAMALPHLVRPGENGHLYRPGDVHGLARHLTALLESPALCAAMGAASREIALTHDHQASLARFEEIYREVAR

SEQ ID NO: 8061 - protein, 401 aa, Mycobacteroides abscessus
MATQPLTILIGADTYPPDVNGAAQFSHRLARAMKDRGHTVHVMASRQEAGTTTSFDVDGLTEHRVRSHKVVTHSYMRLSFPWEIYKDAEHIVQRIKPDVIHVQCHYIIGRVLARIGKKYGIRVIATNHVMPANINPFLPFPQWGKDLVEKASWSDMRRVLSQAAVVTNPTQIGADAMRASGKFKRLVMPVSNGIQSENYELAPGETVEKDPRELLIFFAGRLAVEKNVDVLIEALALLPESLNHTVLEVAGSGEILESLQVKAHECGVEHRVRFLGYVTDEQLRDGYLRADVFCQPGTAELQSLVTLEAMSASKPVVLANALALPHLVEQGQNGYLFEPGNPQDLAEKLAAVLLLSEENRTKMGQHSHQMIEKHAAEKTWQTFESLYVSNQAYHDFVAGRR

SEQ ID NO: 8062 - protein, 398 aa, Myceligenerans xiligouense
MLRILVGAETFAPDVNGAARFADRLSAGLAARGHEVHVVAPSPLGEPGIERRDGVVVHRLSSHRMPGFDAMRVCLPWEAASEVRDVYERVRPDVVHTNGHLSLGRAVVNHAKRTGVPLVATNHLMPENIVGYLPIPASMHESFAGWMYRDLGRVYAQADTVTAPTPSAVDLISRRAGLTSAFPVSNGIDADAYERARDAVAARRGAPTGPTALYEPTVLFVGRLDQEKRVDELIRAFARLAPDVPGRLDVVGDGERRAAWEALAADLGVAGRVRFRGFLSDDELLTAYATADLFCMPGVAELQSLVTMEAMAARLPVIAADAMALPHLVRPGSNGELFQPGDIDELARHLRTLLTDAALRERYGAASRELIQAHTMGATLGVFETLYEKAMGVVPVAA

SEQ ID NO: 8063 - protein, 408 aa, Unknown
  Description of Unknown: Chloroflexi bacterium sequence
MHIAFFTNFYHPVVNGVVRSVASFRQVLMEQGHNVFVFAQSESNYKDTEPFIFRYPSLPLPLPGDISAAIPVSPFVEQLLPALKLDIIHTHHPVLLGQTAARKAAELDLPLVFTFHTQYWEYTHYVPFPQEAIQDFLKNAVHRWLKDFMQKCQHIILPSESMKEILVRDYGLEDRYTVIPTGTDLEPYQCAKWKALRKEKGWQDETVLISVGRLAPEKNWDTLLRAFAKVYPGHPNLRLVLIGDGPARQTLEALAAELGIAEHVTFMGALPFEEVPCYLKAADAFAFASVTETQGLVTIEAMAAGLPIVAVDGSGTRDIVEHGKQGFLVANDVDALAKGIKKLLSDPDRMKRFSNNALKKANTFDVHQLGKQLISVYEQAIQDKKENRYVTLKMEEDSEQEAISPTQP

SEQ ID NO: 8064 - protein, 385 aa, Unknown
  Description of Unknown: Candidatus Methylopumilus turicensis sequence
MKILFISDVYFPRINGVSTSIRTFVKQMQDMGHTVHLIAPEYGIKTEDEAWIKRIPARSIYFDPEDKLMKYGVALDNLISLRKEKYDIIHIHTPFVAHYLGLKLAHLLDVPCVETYHTFFEDYLHHYLPFIPKGIAKSIARQISRRQCNAVDAIVAPSQPMLDVLRQYGVKSKAEVVPTGLQAHSFAKADGAAFRAKYGIAADRPMGLFVGRVAFEKNIGFLLQMWVDLIKKQPNALLVVAGEGPAEASLHALSKELNLEDNIKFIGYLDRNTELNACYQSADVFVFSSLSETQGLVLLEAMAQATPVVAIAELGTKSILIEGEGALIAPHDQVIFADKVYALLSDQARRDALGKAAYQYAKARWTDKAQAERMIHFYTDVTTSI

SEQ ID NO: 8065 - protein, 393 aa, Unknown
  Description of Unknown: Cryobacterium sp. Y50 sequence
MAADTFAPDVNGAARFAERLAAGLVERGHEVQIMAPAASRKHGSWTEMHEGQSMVVHRLHSWRWYPHDWLRFALPWLIRGQSRRILDAYRPDVVHFQSHINVGRGVSIEAAKRGIRLVGTNHFMPENMVKFSLVPLGFQDRVIMAAWRAARRTFGRASAVTTPTRRAAQFLEKYTGLTGIHAISCGINADNYSPNFDSRTENRILFVGRVTGEKQIDVLLKAVAKLNPDLDVQVEIVGGGDQKRNLEHLADTLGIRSRVTFAGYVTDEELRAAYSRATVFAMPSIAELQSIATMEAMASGLPIVAADAMALPHLVHDQANGYLFKPSDAQDLADKLTLVLTAPPEQLEALKRESLKLIAAHDIKRTLITFECLYRGEPVNNLVTNGASAHLPE

SEQ ID NO: 8066 - protein, 390 aa, Methylovorus sp.
MLREADVKILFISDVYFPRINGVSTSIRTFVGQLQELGHEVHLIAPDYGVQTEDEHWIRRIPARTIYFDPEDRLMKYGAALDKLMELRAENYDLIHIHTPFVAHYLGLKLGRLLDVPCVETYHTFFEDYLHHYLPWIPKAMAKGLARMVSRQQCNAVQAIVAPSRPMLDVLRQYGINSTAEVIPTGLQPHSFADADGAAFRTKYGIAQGRPVALFVGRVAFEKNIAFLVRMLTHLRQQQPDALLVIAGEGPAEDSLHAMSKQLGLQDNIQFIGYLDREKELNACYRAADVFVFSSKTETQGLVLLEAMAQGTPVVALAELGTKSILIEGEGALIAPEDEQVFAEKVRCLFSDEVKRKRLGESARQYAAKRWTSRTQAERMLQFYEQLISA

SEQ ID NO: 8067 - protein, 393 aa, Sulfurisoma sediminicola
MYRRHPNRFLRVLMISDVYFPRINGVSTSIETFRADLAAEGIHVRLIAPAYPQRHDAPATWRIPSRRVPFDPEDRLMHWQPLRHTAHHLAADGVDLIHVQTPFAAHYAGTRTARTHRIPVLATYHTHFEEYIAHYLPALPRPWLKAAARRLARGQCNDLDAVVVPSRAMHDTLTGYGVTAPLHVLPTGIPVHSFATGDGAAFRSRHDIPAERPVALFVGRVAFEKNIAFLIDAMATAVKIHPDLLLVIAGEGPALPALRRQATGAGLDGNVRFVGYLDRQTELPDCYAAADVFAFASRTETQGLVLLEAMAAGLPVYALAEMGTRDILDPRRGAVIAPDDPVAFGNGLATLIGNRYQLDTLAAEARDYALEWAAPARARQLAGLYRSLVTSAA

SEQ ID NO: 8068 - protein, 365 aa, Unknown
  Description of Unknown: Halobacteriales archaeon QH_7_69_31 sequence
MQTVAAFTDTYLPTVNGVTYTVRTWRDRWEARGGRMGVVYPRDDGYEPDPREFPVSSVAFPFYPGFRFGSPSVPAGAGDLDPDVVHAHTPFTLGLAARRLARARDVPLVVSYHTPAREYASYISDALAGVISRVADRYERWFFGQADAVVVPSATAATRLRTAGTPIHVVSNGVDVERFRPATEEADAAFRDRHDLPDGPLVGYTGRHGYEKCLEDLLAATEALDVGVALAGDGPARSMLESRAADRGDVRFLGFLNRDAVSGFYSALDVFAFPSPVETQGLVALESIACGTPVVAVDDGALSETVTDGETGYHYQPGDIDAFAAAIRRALDRQSRLGEQCLDARDELSVARSIDRLAAVYAAVT

SEQ ID NO: 8069 - protein, 384 aa, Kocuria tytonicola
MKILITAETYPPDVNGSAQFARRLAHGMLGRGHEVHVAAAMPTSGASRIMTDDGVVEHRFRSHHAFTHPYFRICLPWEIAREVSRLLDELRPDVVHVQCHYIVGRIMVREAVRRGIRVVGTNHFIPENIEPFLPFPQWFIRGYRKVSWWDIARVYGRCDVITAPTPLAVRTMVDNGVPDRAVAVSNGIDAGHYQAAADEQIQHPEHPVVLFCGRLAVEKNVNELIEALALIPREKNVHAEIVGEGEQRERLVKLAHERGVADRVHFLGFLTDDELRRAYLRADVFCQPGTAELQSLVTLEAMSASTPVVLANARALPHLADEGRNGYLFAPGSPGDLAHKLQLVLDAPPEQRRVMGEHSRRMVEQHSFARTLDTFERIYRGESR

SEQ ID NO: 8070 - protein, 658 aa, Amycolatopsis pretoriensis
MTALAIVCALVAAALFAVAAVRQHSEVTDLAVDGAPGLRTLARLLRSPGWWAGTGLAVGGSLLHVVALALAPLPVVQPLGVFSLVLTVLFGRNARRVVTAVVLVVAGVAGFVALAASATPAAAISAGTAELVAVAGFAVAGLAWFARAGCAALAAAAAVLFGLGSSVVHAAASQAPTTAILLGGQALLLLGAGGVILHRAYAAGPAAVVVGTTTVLDPLTAVAVAALAFGEVPRPAAALAAVVALAGVRVLAGAVPHVPSKTEEKPVHPTGLRVLIGADTFPPDINGAAFFAARLARGLAERGHDVHVVCPSDDGPARTEERDGYTIHRLRAHAIPFHRDYRFCTPGGARPAVGELLDRIRPDVVHVQAHFGVGRALLETAAARDVPGMATNHFMPDNLLGYTPFPRRVKNALARWAWRDLKRVYRDARIVTTPTPRAAEVLAGIGLDRPVQVVSCGIDLTHYAAPPRPADRPMSVLFVGRLDAEKNIDQLLRALAPLPHVRADLVGDGTRRHELQELTADLGIGDRVTFHGFVPDADLVHRYAAADVFCMPGTAELQSLATMEAMAAGLPVVAADALALPHLVHHGENGYLFAPGSITTISRWIADLAADPAVRARMGEASRAIVARHDIDGALAAFETQYRILTGLPAAAAVNRAA

SEQ ID NO: 8071 - protein, 393 aa, Agromyces flavus
MGADTFAPDVNGAARFAERLAAGLAERGHDVHVMAPAASRKHGSWKEVHEGQEITAHRVYSWRWYPHDWLRFALPWRIKQNAARILDKVKPDVVHFQSHIVVGRGLSVEAEKRGIRIIGTNHFMPENMLEFSLIPKAWQDWSVGLAWKAARRTFGRAEAVTTPTRRAADFLERYTGLRGVHAISCGIDAHKYFPNWEPRTENRIIFVGRVTGEKQIDVLLRAVTLLPAELDARVEIVGGGDQKRNLEHLAAELGIADRVTFTGYVTDEELREAYHRASVLAMPSIAELQSIVTMESMASALPVVAANAMALPHLVHDGENGYLFEPGSAEDLAAKLRKVLEASPEDYHALKEGSVRLIAAHDIQRTISTFENLYRGKPVTDPVTDVAPVAVPE

SEQ ID NO: 8072 - protein, 364 aa, Unknown
  Description of Unknown: candidate division MSBL1 archaeon SCGC-AAA259E17 sequence
MRIALATDTYHPQINGVVSSIDTIVEELEKEHEVHVFAPTESERAHSFRSFPFYPYPEYKIAYVRPEALAETFEEKEIEIVHVQTPFSLGVSALGASRRLSLPAVGTFHTLLPEYVHYLSRAPEFLLRKFGWKYITWFYGRFNAVTVPSKPIKKSLVRRGLENVYVIPNAVNTDFFHPGRNSSEANPSVLFVGRLAKEKNLKVLIDAAPTVLKEYPDTKFRIIGKGIHGDWYRELVKRKNLSSSFNFEGYVPSRELIEAYQECQIFAMPSTTETQGLVALEAMACETPVVGADARGLKDVISHGMDGYLFQPGDLEALSDYLLRLLSDDKSRKRMGEKARQKAEEFSSQKIGKQWTKFYSSLLG

SEQ ID NO: 8073 - protein, 426 aa, Rathayibacter sp.
MSDPRDASRPESSTGDSAPADAARRPLTVVIGCDTFAPDVNGAAKFAERLAAGLQARGHEVHVVAPSADGWSGTRVEDHEGQRIIVHRLFSLRWPPHDWLRFAMPWRIRQNSARILDEVKPDVVHFQSHVIVGRGLGQEAAKRGIRIIGTNHFMPENMLEFTLLPKAAQAKAVAMAWRAARRTFGRAEAVTTPTRKAAQFLEKYTGLQGVRAISCGIDADNYTPDFTPRTANRILFVGRVTGEKHIDVLLRAVSLLDPSLDAQLEIVGGGDQMRNLQQLATTLGIADRVHFTGYVSDAELKQAYSRATVFAMPSIAELQSIATMEAMASALPVVAADAMALPHLVHEGENGHLFEPGNAQALADGLTDVLTADPERLEALKRSSLRIVAAHDINRTISTFESLYRGEPVADPAADAASAPAGRAAS

SEQ ID NO: 8074 - protein, 418 aa, Nocardiopsis kunsanensis
MLRAAHPLSVLVVTDTYPPDVNGAAYFTHRLADGLAGRGHRVHVLCPSAQGQPHVTMAGEVTEHRVPSARIPLQPTMRAALPLGLRGHVDRLLARLAPDVVHVQSHFTLSRTALARARAAGIPTVLTNHFMPDNLYAHARVPRSLQSVAGSLAWHDMVRVAEQADHVTTPTPRAARLLREQGLRRGVEEVSCGIDLDRFHPRASERSAARARLGVPDRDSIVFVGRLDEEKRVDELVRALALITPDLDTQLVLAGTGQREEELAELARALGMEERVRFLGFVPDELLPSVYVAGDVFAIAGVAELQSIATLEAMSTGLPVVAADAMALPHLVAEGRNGYLFPSGEVEVLADRLRAVLSSRTERGFLGAAGREMAAEHDHRRSLERFESLYAHLGGAVLASVPSGPRVRGDRYARIVQG

SEQ ID NO: 8075 - protein, 409 aa, Arthrobacter alpinus
MNPPGVLSVSSTTSDSAQKPLTILIAADTYPPHINGAAQFCFRLATGMTARGHKVHVMACRADSGPMFTEERSEATVHRLRSRSVPTHEYFRISLPWEIKRDIKALFDVLQPDVVHVQSHYMIGEHVVYEAARRGIRIVATNHFMPENLNPFLPFPQWFKNIVGRVSWRDMGKVMSKADVVTTPTPLAAKAMHEHAFLRKVLPLSNGIESGNYELAEGETVPRNPYPTLAFVGRLAEEKHIDVLIDALAKTPADLNLHLVVVGGGEVKNALKAQAEKLGLSSRVSFTGLISDEELREVYLKADLFVMPGTAELQSLVTLEAMSASTPVVLANAMALPHLVEDGVNGYLFKPNDSDDLKEKITTIMRLSPEDRAAMGAASHSMVARHGLTKTLDTFEDIYRGGSYEDHAV

SEQ ID NO: 8076 - protein, 416 aa, Unknown
  Description of Unknown: Brevibacterium sandarakinum sequence
MLSAHRHTPVRRILIPTETYAPEVNGAAKFAERLAEGLAARGNDVHVACPSATGKASVSVEDGVTVHRMTSHRWPLHPTWTICMPWETKPELSRLLDSLQPDVVHTQAHFVIGRYAFSEASRRGIPVVATNHFMPDNVRPYLRAPKTLLDGGTAVAWWDLRRKFQSADFITVPTQLAADLLTQNGFSSPIRAVSCGIDLERFAHLRDDGSAHPEPASDRTVSGSDDEASSPPRVLFVGRLSSEKHAADIVEAVAKTDPALGLEADIVGGGDQEEPLKELAAELGIADRIHVMGKISDKELMDAYQRCTFFCMPSTAELQSIATLEALASRKPVVLADAVALPHLVRDGVNGFLFPPRDIEELAARFTHICELPDGELDTMARASLDVVAKHDIEYTLDTFESIYAGVIADRLDPAA

SEQ ID NO: 8077 - protein, 392 aa, Unknown
  Description of Unknown: Propionibacteriaceae bacterium NML 150081 sequence
MRILIGTDTYPPTVNGAANFSERLAHGLVGRGHDVHVVCPSPDAHVGPVERDGMILHHVRAFDYWAYKSFRVIYPWQAHPVSRQLIKVIDPEVVHLQDHFLIGRGLAHACRKYGYPLVATNHLVPENFFDHVPVPAPVRGIGSRWLWDDLERAFSCAAVVTSPTQKAVDLLEEATDMRALAVSNGIDVEPYAAAEQRWAAHRARADHVPTILFVGRLDQEKRVNDPIRAMAKLPADLPAKLEIVGQGGMRHEWEQLATELGLGPDRIEFRGFIDDDELLETYGRADLFCMPGVAELQSLVTMEAMAAGMPVVAANAMALPHLVRPGRNGWLYEPGDVEDLVARLTPLLRDGGLRQRMGEASKEIVASHAMATTLDRFEELYELAIRTQTARN

SEQ ID NO: 8078 - protein, 427 aa, Unknown
  Description of Unknown: Opitutaceae bacterium EW11 sequence
MMTNTYLPHVGGVARSVSTFAEEYTRRGHRVLVVAPEFEGKPLPKRAEALVERVPAIQKFNGSDFSVRLPIATVMSERLDVFPADVVHAHHPFLLGDTALRIAASKNVPVIFTHHTKYEDYTHYVPFNSPALREFAINLSTHFANLCDGVIAPSESIADLIKSRGVEVPIRVVPTGIDVKLFSSGDRERFRRKYGFGDDILVVGHVGRLAPEKNLEYLAEAVAQYVASQPSARFFVVGAGPSEDVLKEAFTRRGIAKSLVMAGKLTGPALVAAYRAMDVFAFASKSETQGMVLAEAMAAGLPVVALDASGVREVVRHGRNGYLLPEDASPRRFASYLKRLHLNPRRRAAFVAQAARTAETFSREHCAEQALAFYDEILRATRRDRLLNWLNPWGVMLERLNVEWNLLAQKAQSVVEAVTASSEQKAS

SEQ ID NO: 8079 - protein, 391 aa, Unknown
  Description of Unknown: uncultured prokaryote sequence
MSAQTGPGKGDRGLAVGMFTDSYRPRLSGVVHSVAAVTRALREQGHRVVVFAPRHPGYRDDEPDVVRLPSVVTSRYPDFPLLVPLVGDLDRRVRDLGLQVVHAHSPFTAGRLAAASRGRCPLVFTHHTLYEHYVHYAPLVPGFLARQWVRWHVVRFCNRCDLVVAPTRAVSEFLRVRGVRSRVEVVETAALDLGALRRVPAADPTACGIPPGAPLVVSAGRMAPEKSMDVVLEAFARTRGLQDAYLVLAGGGPSLDVLRQLARRLGVEARVRFLGPLPWEGVVAWMKAAWVFAFASRTETQGLVAAEALACGTPVVAVRAGGVAEVVDHGRTGLLVDPSPDLLGQAMARLVGDEGLRRWMADQARQESERFSARRVAGRLVELYRSLLDAA

SEQ ID NO: 8080 - protein, 444 aa, Rathayibacter sp.
MGPRREPRNRPTSADRSLLSPSGTTPIGPPVSDPRDASRPGSPDSRPLTVVIGCDTFAPDVNGAAKFAERLAAGLAQRGHEVHVVAPSADGWSGTRVETHEGQRIIVHRLYSWRWYPHDWLRFAMPWRIRQNSARILDEVKPDVVHFQSHIIVGRGLGIEAAKRGIRIVGTNHFMPENMLEFTLLPKAVQAKAVAMAWRAARRTFGRAEAVTTPTRKAAQFLEKYTGLRGVHSISCGIDADNYTPDFEARAGNSILFVGRVTGEKHIDVLLRAVALLDPALDAKLEIVGGGDQMRNLQQLATTLGIADRVRFTGYVSDADLKEAYTRATVFAMPSIAELQSIATMEAMASALPVVAADAMALPHLVHDGENGYLFAPGSAEALAERLTAVLTADREDFEAMKRASLRIVAAHDINRTISTFESLYRGEPVAVPASDAASAPAAT

SEQ ID NO: 8081 - protein, 401 aa, Nonomuraea coxensis
MPLHSVTDRALLAPAPERPRRVLISTDTYPPDVNGAAYFTHRLATGLAARGNEVHVVCQSEHGPASADVVDGVIVHRLRSAPLLVHPTMRVTVPARLDRLVADIGPDVLHTQGHFVVGRAAIAAARRAGVPVVATNHFMPDNLFQFAHIPARLRAKAGRLAWRDFARVFNRADHVTTPTPLAARLLADQGFAREVEPVSCGIDLSRFHPHAEPKAWARKLFGLPDRPTVLFVGRLDEEKRIDELVRALPLVLNETDAQVALVGKGNQRAELERLAARIGVGDRVFFLGFVPDENMPQAYAAADVFAMPGVAELQSIATLEAMATGLPVVAADAMALPHLVVCNGHLFQPGDVVELARHLTRVLGDDELRARYGRASRELALTHDDQASLARFEAIYDEVAR

SEQ ID NO: 8082 - protein, 311 aa, Unknown
  Description of Unknown: Candidatus Rokubacteria bacterium sequence
MTDTPVRVALFTNNYLPFCGGVTVSVETLRAGLEAAGHEAWVFGPRLAAAADGSPRVVRYPSIPAATYPEFALAVPYSRRITRLVASLEFDVFHAHHPFLLGPAARRLARRWRRPLVFTYHTRYEKYAHYVPLRRPLVEALAVRLSTRFAARADAVIAPSAVIRDELQARGVATPIAVVPTGVDLSRFRPGDRGAARAALGVPGDDPLLLYVGRLDREKSVDRVLLAFERVASTLPAARLILVGRGTEAARLERLARSLPVADRIRFCGARPHAMLPSCYQAADVFLFASETETQGLVLVEAAACGLPAVA

SEQ ID NO: 8083 - protein, 923 aa, Unknown
  Description of Unknown: Nitrospiraceae bacterium sequence
MITLNEEKNMARALSSCSFADEIVVVDGGSTDNTLNILKAHEKVVLIQHPWEDHFGKQRQVSLDHCTGEWVIRLDPDEAFSREFEDNIRNLLSSTTPDVTGYNIRQCNLVGNEKYYSKAFDNFETNPRIWRNLPVIKWEQKIHEILGGLYGRIGQWDVYVVHYGFLDKERYRQKGRYYSQLKESGFENPDELYFREYDIQQRPVRAATAPYVPAYNMEESIEGLPEVAIVRGPNLNQWETQNYEPLSDKFNITLYSSDKPAFDLTRINLPVVKLPSHPEDRAYMKGLEFELFDKDIIYTADITWMFTYQAVIAKHKFGKKVIALEWENIPFAHEENEIVQEIKQQNRDLVDVFVAVTKRAKDALLLEGVPEDKIVVIPMGIDTTRFRPDKETGIRVRKDLGIAEEEKVVLFTGRMVWEKGIYDLVHAAKLVTLDKSIKTLPLRFVVVGRGQEAQEIKKIVSKLCMNNIFLFIESHPYSRMHEIYNMADIFVLPSIAIRNWKEQFGMVLAEAMACGVPVISALSGSIDEVVADAGLLVQPNDPSGLSSALVNLLKDELLRKELGIKGRERAVREYDSRKIAGKFAALFEDVFKSTFKGAVSELAEYTRLKDNDILKRIRSVYSSQIQEWKSVIGEQLTQDRVLEFYRRTDSYLFDLVQYNYENPYYARWTEDLFNFCAGLNNEKEELKILDFGGGIGSQIISLSKLKGAKLSYADIPGKTFEYAGWRFNRRHIDIDMIDAGKEDFLEERIFDVVITLDVVEHLVDPEAAVRYLVSHIKPDGYLVVVTSFVDNNGEAGWHLNSDRYTDEAFYNFIKSFGMEMLNNGYPRIFQKSNELVDLLAEIASATGEGRSADSRRHLESYLQLQPFDLDMLVKHADVCLKLGDMDTASENIEKVLLLNPGMPEALEIAEKIKSKDNENTSCK

SEQ ID NO: 8084 - protein, 437 aa, Subtercola boreus
MSASSGTNPASADAVPAKPLKIIIGADTFSPNVNGSARFSQRLASGLAARGHEVHVVAPSASRKHGTWTESYDGQDITVHRLRSFRWYPHDWLRFAEPWFINKNSDRILAEVEPDVVHFQSHIIVGRGLSIAARKRGNVRVIGTNHFMPENLLEFTLLPKSWQEKAVGMAWKAAKRTFGRADVVTTPTQKAAEFLEKSTGLDGVLAISCGIDADNYTPSFERRTANRILFVGRVTGEKQIDVLIKAVSLLPSDLDVQLDIVGGGDLLKHLENVSKTLGVDDRVHFSGYVTEDELREAYTNATIFGMPSIAELQSIATMEAMASGLPVVAANAMALPHLVKDGVNGYLFAPGDAQQMADRIESLLRLPQDELDAFKKASLKLIEKHDLVRTIVTFERLYRGESTVDVAAIDEIMAAESLNTSSIRIVDVAPEQSDAAH

SEQ ID NO: 8085 - protein, 395 aa, Pseudonocardia sp.
MRVLIGADTFPPDINGAARFTARLAAGLAGRGHEVHVVAPSDTGPASSPVPAAGMTAVHRLRSYRVPGQDRFRACLPGPAAAGAQRVLRAVRPDVVHVQSHFQVGRGLLAAASAAGCPTVATNHFMPENLLQHARVPDVLAERVSRWAWRDLARVYGAADVVTAPTPRAVELLGARAGLSGRAVSCGIDLSRFGTGGVEPEPASEPTVLFVGRLEREKRVDELIRAFALVTGPARLEIVGDGTRRAGWSALARDLGLADRVRFRGAVDDDALVAAYRRCAVFCMPGIAELQSLVTLEAMAAGRPVVAADAVALPHLVHPGRNGLLYRPADVAGLAAALTALLDDPATRARMGAAGREAAAAHDLDATLDAFEDVYSDVRRGAARGRVRRPVAGVV

SEQ ID NO: 8086 - protein, 398 aa, Nesterenkonia massiliensis
MNSGKPLRILIAADTYPPDVNGAAVFGYRLAKHMNARGHEVHIAAARPGPGPDTVEQRDEATIHRFRSFKAPTHEYYRLCLPWLVEPAMGRLMDSIEPDVVHVQCHYMIGKAAIEAAEARRIRTVATNHFMPENLDPFLPFPRWFKRIVSANSWRDMGRLMGKASVVTTPTPLAARTMVEKAGFDRVLPLSNGIDVDYYTVRPGENVPTRDKPTVLFVGRLAVEKNVDVLIDAISKTDPALDISLEIIGDGEQRDKLRDQVETLRLQDRVNMRGHVDDVELRRAYIAADAFCQPGTAELQSLVSLEAMSAAKPVVLANALALPHLVSEGENGYLFEPNNSADLAEKLNQIFRKSAVERAAMGAASREKANQHAIGKTMAAYEALYEGADWVELDQFHA

SEQ ID NO: 8087 - protein, 388 aa, Desulfovirgula thermocuniculi
MKIGIFTDSYLPYTSGVVRSIETCNAELRSMGHETLIFAPGYKNYSQEEEGVFRFPSVPAPTNRDFALAIPFSPRFKPLIEQWRPDIIHVHSPFLLGRLGARQARRLKVPLVFTFHTLYDQYVHYFPFARSLAREATRQLCRAFCNRCDLVIVPTSIIARYLQDMGIRTRIKVIPTGIKLEEYAGGEKSWLRHKLQLPPGEKILLFVGRLGKEKNIDFLLASFAHLVQEFEAARLVLVGGGPEEENLRKRARHLGIAGKVTFMGPLPKKEVINCYAGADVFVFSSKTETQGLVLAEAKAAGLPVVAVKAFGTAEMVDDGRDGFLTPEDSNAFTAKIKELLTSDQLRQQMSEEARKNARLLSSRHTAQMLMEEYQGLLAKRNHPSPCRP

SEQ ID NO: 8088 - protein, 484 aa, Halomonas sulfidaeris
MPFRVAISGHKSPHNMPPLRRHSNHNTLDESEFAAFSKARSQALSQALSQALTHLAKGNALAQHREAERETRLASALTRFHSTAPTTAMPLKGMKVLMISDVYFPRVNGVSTSIASFRGALERLGHSVTLICPDYPVGQVDEPGVLRIPSRRVPGDPEDRMMRYRDLLALAPSLAVEAFDLIHVHTPFTAHYAGVALGRRLRLPVVATYHTLFEEYIHHYIRWLPRRWLRFAARRLSVHQCQQLDALVAPSRAMQQALTHYGVTTPITVIATGLALEAFCQSQDQRDFRAHYDLPQEARRLLYVGRAAFEKNIDFLIDMLPQVLAEHPTTRLIITGEGPAHDSLVKRAQEMGVADAVLFLGYLDRNGPLQAAYRAADVFVFASRTETQGLVLLEAMALGTPVVSTAMMGTLDVLKEGEGCLIAKDNHDDFATKVNRLLSDESLRQQLAERAQVYAASWHEDAKSAELITLYHQLTAERCKSTDT

SEQ ID NO: 8089 - protein, 392 aa, Unknown
  Description of Unknown: Salinibacterium sp. CGMCC 1.16371 sequence
MGCDTFPPDINGAANFASRLGAGLTERGHEVLVVAPAFSRKRGRFIEDHDGSRFAVERLFSLRWYPHDWLRFAMPWNSQANAARILDSFQPDVVHIQSHILVGRGLARQAVKRGIRVVATNHFMPENMIEHTLLPKFVRKPAIRMAWKDASKTFALCESVTTPTRKAAVFLESETELTDVHAISCGIDASLYSQNMDKPAENRIVFVGRVTGEKHIDVLLRAVATLDPSLDVKLDIVGGGDQLSALKQLAVSLGIRDRVDFTGYVSDQELRSILTRASLFAMPSIAELQSIATMEAMASGLPVVAADAMALPHLVHDGENGFLFTPGDAADLAEKLTRVLEMPWDQVLAFKKASLKLIVPHDIQRTLTTFESLYRGESVTDPATDVSLGESA

SEQ ID NO: 8090 - protein, 374 aa, Promicromonospora sp.
MNGAARFAGSLANGLARRGYDVHVVAPSPTGRPMREERDGVVLHGLRSRRYPSHHNLQVCLPWETRRGIAEVLEEVEPDVVHTNGSYILGRALVDAAHRAGLPLVATNHLMPENLVGYLLVPSSMHRKVGQWLWQDIGRVYSKADVVTAPTPRAVDLLAQHAGLTHAVPVSNGIDTDRYTTTNRDGHAEPTVLFVGRLDQEKRVDEIIRAFALLPDDLPGRLEIVGTGTKADDWAALAASSGVTGRVRFRGYVPDDELLTAYSEADVFCMPGVAELQSLVTLEAMASGLPVVAADAMALPHLVRPGVNGWLYTPGDVRELANRLGDLLADAGLRHRMGAASRELVAAHAVDGTLDAFEGIYEKVRAMRNQPATA

SEQ ID NO: 8091 - protein, 396 aa, Thermostaphylospora chromogena
MRVLIATDTYPPDVNGAAYFTHRLATGLAGRGHDVHVVCASDRGPARDERVNGVLLHRLRSASVLVHPTMRVAVPSRLDSLLSAVAPDVVHVQGHFITGRAAISAARRAGVPVVATNHFMPDNLFQFAHVPQRLRGIVGRLAWRDFGRVFARADHVTTPTPIAARLLAEQGFTRDVEAVSCGIDLTRFRPPARPKSHARNLLGLPDRPTVLFVGRLDEEKRLEEAVRALPLVRNVTDAQLALVGEGRCRQELEWLAARIGVGEHVRFCGFVPDELIPEVYAAADVFCMPGVAELQSIATLEAMATGLPVAAADAMALPHLVRPGETGFLHRPGDVQALARHLIELLTSDEKRAEMGRAARRIAMTHDHQASLARFEDIYRSLSAARRTAAEEEAPL

SEQ ID NO: 8092 - protein, 385 aa, Thiorhodospira sibirica
MKILMITDVYFPRINGVSTSIATFKQAFEAAGHQLTLIAPQYLAPYDDDAAIIRVSSRRVPFDPEDRMLKYREVLALAPTLAAEGYDILHIQTPFLAHYLGLKLARRLDIPCVESYHTYFEEYLFHYLPLVPDAWMRALARQFSRGQCNAVNAVIVPSRAMQTVLQNYGVATPQHVIPTGIPLELFAHGDGQAFRQSLGIAPHTPVLTHVGRIAHEKNVDFLLRVVQRIKAQQPDVMLLLTGEGPALAHIKQLAATLGLNDNIRFLGYLDRRTRLADCYAAGDVFIFASRTETQGLVLLESMAAGVPVVALSIMGTRDILEPGLGALVAQDDEADFARQVLTLLQDRALRERLSHEARDYATRWSVPHTAQQTLAVYAQCVAARR

SEQ ID NO: 8093 - protein, 398 aa, Prauserella muralis
MRVLIATDTYPPDLSGSSFFADRLARGLAARGLDVHVVCASDTGPRTDVVRDGVALHRLRSVPLLIHPTVRFVPPPGVHGVLRRLVARVRPDVLHTQDHFTIGRAAVAAAVRSGIPVVATNHFMPDNLLPYLPRWLHAAVSWLAWRDFHRIYRHADHLTTPTRVAADLVARTGFEREVEPVSCGVDLSRFRTPAASATDPRMWARKELELPDLPTIAFVGRLDAEKRLDELIRALARITARVRAQLVLAGRGTRRAELERLACAEGVREHVHFLGFVPDEQLPAVYAAADVFAMPGVAELQSIATLEAMASGLPVVAADAVALPHLVSPGENGFLFTSGDVAGLAAVLTRILTSPELRDRMGAVSLAMASRHDQDRTLERFEEIYAAVSAGRGPAAKG

SEQ ID NO: 8094 - protein, 416 aa, Allokutzneria albata
MTSNRPLRIVIGADTFPPDVNGAANFAHRLAVGLASVGHEVHVLCPAPSASAPMLAGVNAVDGITVHHLKSYRWPFYDDFRFSVPWKAKAETEELLWQIRPDLVHVQAHFVVGRALSKTAPALGIPLVATNHFMPENLFAHAKVPRWLRSTAAKLAYRDLAKVFGRAQMVTAPTPRAVELLHANKLGQEALAISCGIDIQKYRGGTPVARTPGATKTVLFVGRLDEEKRVDELLHAIAKLPEHIDVRAEIVGGGSCEKSLVELAGKLGITDRVRFLGRISDEELVQAYARCDLFCMPGIAELQSLVTMEAMAAGKPVIAADAMALPHLVRPGHNGWLFPPGNVLVLAARLAQTLGDEDMLRRMGAASAEMITEHALAATLERFESLYRKVIADAKGSIRLVPKIEPAAPTTLPRSA

SEQ ID NO: 8095 - protein, 390 aa, Pseudomethylobacillus aquaticus
MKILFISDVYFPRINGVSTSIRTFVHEFQALGHHVDLIAPDYGITTADEHWIKRIPARGIYFDPEDKLMRYGQALDRLIELRRANYDLIHIHTPFVAHYLGLKLAHLLDVPVVETYHTFFEDYLHHYLPWLPSGFSRSFARFVSRRQCNAVDAIIAPSQPMLDVLRAYGVKTLAEVVPTGLQAHSFVEGDGARFREQHGIPAERPLLLYVGRVAFEKSIDFLLHMVDVLRKQQPEVLLVIAGEGPAEASLHALNEQLGLQANVMFIGYLDREKELNSCYHAADIFVFASRSETQGLVLLEAMAQAVPVVAIAELGTRSILVEGQGAHIAEADVQQFAGRVHQLLQDHEERAALGQAAHHYASKHWTSRAQALRMLQLYQRLIEPRSNFPD

SEQ ID NO: 8096 - protein, 399 aa, Stackebrandtia nassauensis
MIPGTRRVLIASDTYPPDVNGAGYFTHRLAAGLAARGNEVHVVCPSPDGPAGRETRDGVTVHRLRSHPLLLHPTMRFVVPAAVNRAIREVVTAVAPDVVHVQGHFPVGRATLKHAARVGIPTIATNHFMPDNLLHHVKVPTRLRKWVASRAWRDAAAVFARADHVTTPTRLAAEVFRDNGFTGHIEPVSCGIDLSRFHPRSTSATAARARLDLPDRKTILFVGRLDEEKRVHELIRALPSLRRRVDAQLVIAGTGPQGPALTRLAADLGISAYVRFLGFVPDADLPGVYRAADLFAIAGVAELQSIVTLEAMASGLPVVAADAVALPHLVRNGHNGFLFTPGDIDGISTRLEVILESADEIAAMGAASRAMAAEHDHARSLARFEEIYTHLAAPARSRI

SEQ ID NO: 8097 - protein, 399 aa, Serinicoccus chungangensis
MRVHPSAHPHPPPGRRRVLLLTDSYRPTVNGVVSSVDELRQGLLEAGHEVRVLTVGPTRRTTFDGQVYRLPSLDASHVYPHARLGRPVDGPLLADLVRWRPEVLHSHTEFVAFWWARRLAHRVAVPHVHTYHTLYADYTHYFCPHERLGRSLCAAFARHTLDRTDLVIAPTEKIRRLLQGYAVRPPVEVVPTGVDLARFAPGAGSPELRSALGLEPGVPVVLSLGRLAAEKNLAEVVDLLARVPDPWQLVVAGDGPEAGALHRQVGRLGLGDRVRFVGAVEPSRVPELYRLADVFVSASRTETQGLTVLEALATGVPVVCRDDAAVDGVVVAGRNGERYTTPEEFTRAMTRLLRDPDLRRRWGREAVRTATGLGRDGFVAAVCSAYDRAAGRDSTTVAA

SEQ ID NO: 8098 - protein, 393 aa, Agromyces sp.
MGADTFAPDVNGAARFAERLAAGLVERGHDVHVMAPAASRKHGTWKEVHEGAELTAHRLRSWRWYPHDWLRFALPWRIRQNSARVIDQVKPDVVHFQSHIIVGRGLSIEAEKRGIRIIGTNHFMPENMLEFTLLPKAWQDWAVGLAWKAARRTFGRAEAVTTPTRKAAQFLERHTGLVGVHAISCGIDAHKYAPNWEPRTENRILFVGRVTGEKQIDVLLRAITLLPASLDVKVEIVGGGDQKRNLEHLAVQLGIADRVTFTGYVTDEELREAYHRASVLAMPSIAELQSIVTMEAMASALPVVAANAMALPHLVHHGENGYLFDPGNPQDLADKLRMVLEAEPDDYNALKARSVKLIKAHDITRTLDTFESLYRGQRVTDPVTESIPVILPD

SEQ ID NO: 8099 - protein, 405 aa, Kutzneria buriramensis
MTSTAPAPAIGAEATPPRLRVVIGVDTFPPDVNGAANFASRLAAGLAGRGHDVHVLCPSTTARSTTESDGTLTVHRVSSLSTPVHPTFRISRPLRASRTAEALLTELAPDVVHVQAHFVVGRALAAAARRHDIPLVATNHFMPENLHGYLPMPKGLRAALSRLGWWDLRRVLSSARTVTAPTPRAVQLLAEHGIPDAIAVSCGIDLTRFPASPAPDHLVPHVLFVGRLDEEKRVDEILLAVHRLRRTAHVRVEIVGDGKCRRAWQELAGRLGIAGDVTFHGHVDDDALLAAYRRADIFCMPGVAELQSLATMDALAAGKPVVAADAMALPHLVLPGETGWLFPPGDIAALADRLRDLIGDPAARARMGAAGRELIGRHTLDGTLDRFEALYRNALMPARRGFFVR

SEQ ID NO: 8100 - protein, 433 aa, Allonocardiopsis opalescens
MSAVDQAVPAEPTRKRILIGTDTYPPDVNGAAYFTARLAEGLSARGNDVHVVCPSPDGPPRIERRNGVTLHRVRSASVLVHPTMRTALPLGLAGTLRRLLDRFAPHVIHAQGHFVIGRTLISAGRRNGTPVVLTNHFMPENLFHYAHVPGPLQGPTGGLAWRDFVRVMGTVDHVTTPTAKAARLLLDKGFGHPVEAVSCGIDLSRFHPRPERGAKARAMLGLPERETVMFVGRLDDEKRIDDMVRALPMIAKVRDAQLALVGTGSRRAALEQLAASLGVADRVRFLGFVPDDELPMAYQAADVFGIASIAELQSIATLEAMASGLPVVAADAMALPHLVDEDRNGYLYPPGDHGAFAHRVLSILESGPKRAAMAEASLEIARRHDHERSLARFEEIYDTVRPGVGIDRRRRRVAVSSGSPVVVERARARELTR

SEQ ID NO: 8101 - protein, 394 aa, Unknown
  Description of Unknown: unclassified Leifsonia sequence
MGCDTFAPDVNGAARFAERLAAGLVEHGHDVHIVAPAASRRHGTWVEEHQGQKMTVHRLRSWRWYPHDWLRFALPWTSKANARRVLDQVKPDVVHIQSHIVVGRGLAAEAEKRGIRIVATNHVMAENVVEFTLLPKFLQKTFVKLAWADARPTFDRAEAVTTPTRKAAEFLERSTGLRDIHAVSCGIDAHNYTPDFTPRTANRILFVGRITGEKHIDVLLKAMKLLPATLDAHLQIVGGGDQLKNLQTMAETTGITDRVEFLGYVSDQQLREAYSRATVFAMPSIAELQSIATMEAMASALPVVAADAMALPHLVHDGENGYLFRPGDAQDLADKLERVLTMPQEELDVLKHGSLRIVAAHDIQTTISTFESLYRGEPVADPVTDAAPSVPAPE

SEQ ID NO: 8102 - protein, 391 aa, Diaminobutyricimonas aerilata
MGCDTFAPDVNGAAKFAERLAAALVRHGHEVHIVAPAASRKHGTWTEVHEGERMTVHRLKSWRWYPHPWLRFALPWQIEANSRRILDEVKPDVVHFQSHIVVGRGLSVAAIERGIRVIGTNHFMPNNALQFTLIPEAFQQRAVKAMWRAAQRSYLRAEAVTTPTRRAAEFLEANTSLHNVLAISCGLNVSDYTADLGPRTDHRVVFVGRVEEEKQVDRLIRAVAQLKDELDVQLEIVGDGDQRRPLEALATELGVRDRVHFAGRVSDEYLRAALTRASVFAMPSIAELQSIATMEAMASGLPVVAADAMALPHLVHDGENGYLFEPGNADELAARLRDVLTATPERYREMQQESLNIVAAHDIENTVRTFERLYRGEPVGANGAPAGNSAH

SEQ ID NO: 8103 - protein, 456 aa, Halomonas boliviensis
MPQRRRPPLNSPLSDQEVAALTQLANGNALHQQREADREAQLASRLPLFHSTASACEAQPGGMKILMISDVYFPRVNGVSTSIASFRGALERLGHSVTLICPDYPLGQVDEPGVLRIRSHRVPGDPEDRMMRYRDLLALTPQFAGKAFDLIHVHTPFTAHYAGVALGRRLGLPVVATYHTLFEEYVHHYIRWLPRRWLRWAARRLSVHQCQQLDALIAPSRAMQDALSRYGVTTPTTVIATGLALESFCHTQGAQHDSDFRAHYHLPQEARLLLYVGRAAFEKNINFLIDMLPKVLAEHPTTRLIITGEGPAHDSLVRRAEEIGLAESVLFLGYLDRNGPLQAAYRAADVFVFASRTETQGLVLLEAMVLGTPVVSTAAMGTLDVLKEGEGCLIAEENHDDFASKVNRLLSDDTLRQQLAERAQSYAASWHEDTKSTELVSLYRQILGASLINMSK

SEQ ID NO: 8104 - protein, 393 aa, Unknown
  Description of Unknown: Cryobacterium tepidiphilum sequence
MAADTFTPDVNGAARFAERLASGLAARGHDVHVMAPAASRKHGTWVEVHDGQSMTVHRLFSLRWYPHDWLRFALPWTIRRDSRRILDSVKPDVVHLQSHINIGRGLSLEAQKRGIRTIATNHFMPENMLEFTLIPKRMQNWAITVAWKAASRVYARVAAVTTPTRRAAEFLEKYTGLTGVHAISCGIDADNYTPDFGPRTENRVLFVGRVTGEKNIDVLLRAVTLLPADLDARVEIVGGGDQKRNLEHMADTLGIRDRVTFTGYVTDEELRAAYTRSTVFAMPSIAELQSIATMEAMASGLPVVAANAMALPHLVHDGENGHLFEPGNPQDLADKLATVLTAAPEELTAMKRESLKLIEAHDINRTLSTFESLYRGESVTDPITDETAARSVE

SEQ ID NO: 8105 - protein, 386 aa, Saccharomonospora halophila
MRILISTDTYPPDVSGSSFFAHTLAVGLADRGHDVHVVCASDEGPRRDVREDGVLLHRLRSVPLVIHPAVRFVPPPGVPAQLRRLVPGIAPDVLHTQDHFTIGRAAVRAARRHDIPVVATHHFMPDNLLPYLPRRVHAPIARRAWTDCLRVYEHVDHVTAPTRTAAELVTGRGFDRVVEPVSCGVDTDRFRPPDGPRGPLRKELGWPDLPTVVFVGRLDAEKRLDELIRAWPAVTHHVDAQLVLVGTGTRRGELERLAEHTGVRHRVRFPGFVPDALLPTVYRAADVFAIPGVAELQSIATLEAVASGLPVVAADAVALPHLVSPGRNGFLFRPGDVDGLAGSLVRLLTSDDLRTRMGTAGRTVAAAHSRTRTLERFEEIYRTLLR

SEQ ID NO: 8106 - protein, 406 aa, Micrococcus sp.
MSDRPGIAADRPLKVLIAADTYPPHVNGAATFGHRLATALHARGHEVHVVMPRSDAGPDTVEHRPEATVHLLRSLPAPTHEYYRVVLPRHAKISFRRIYREVQPDVVHAQCHYMIGEAAINEAERRRIRIVSTNHFMPENLEPFLPFPQWFLDIVSRVSWKDMGRLMGKGAVVTTPTALAAQAMAEHAGLDNVLPVSNGIDASAYELQPGERVDHPGHPVVLFVGRLAVEKNVEVLIRAIAHLARTRPDLDVHAEIVGDGEQRDRIRATVDEEGAADRVLLRGHVSEEELRAAYLRADVFCQPGTAELQSLVTLEALSASTPVVLADALALPHLVDEGVNGHLFPPGDHVALAERIARILDLSDADRAAMGEASHAKALHHSAQKTVDIFERLYRGATAAEVRALL

SEQ ID NO: 8107 - protein, 400 aa, Halomonas taeanensis
MKILMISDVYFPRVNGVSTSIESFRRALTRLGHSVTLICPAYPVGHEDDPGIRRIHSRGVLTDPEDRMMHYRRILALAPELAAQGFDLIHVHTPFVAHYAGRALGARLGLPVFETCHTLFEEYLHHYLTWLPASLLRFAARRVAVRQCQTVAALISPSTPMREALVRYGVSRPISVVATGLPVEAFAAGGEGQVSAADTRRGFDIDAEAPLLLFVGRAAHEKNIAFLIEMLPRVLACHPHATLVVAGEGPARQALARQARAAGVEASVRFVGYLARDGELQALYRAADVFVFASRTETQGLVLLEAMALATPVVSTAVMGTRDVLCDGEGCLVAEDDESAFAATVNRLLEDPALSSELAQRAVVYAGRWHEVAQATALLECYQSQLAPKEEVALPSIGSP

SEQ ID NO: 8108 - protein, 458 aa, Unknown
  Description of Unknown: unclassified Plantibacter sequence
MLEHGVPRRIRVVSDRPHPLTSLAKHRGITDTLTSPDDQHLAKASSTTPTPDTHKPLRVVIGADTFSPDVNGAARFAERLAAGLVRRGHDVHIVAPAGSRKFGTWKETHEGQTMTAHRLFSLRWYPHDWLRFAMPWSMRRNARKILDRVKPDVVHLQSHIVVGRGLSIEAEQRGIRMVATNHIMPDNILDFTVIPKRTQEWLVRTQWAAARRVFDRAFAVTTPTRKAADFLEQFTGLTGVHAISCGIEAGQYTPSFEPRKRNTILFVGRITSEKQIDVLLRALTKLPKELDAHVDVIGGGDQAKNLEQLTQQLGIGDRVRFLGKVSDDEVKQAYTNATVFAMPSIAELQSIATMEAMASGLPVVAADAMALPHLVHDQVNGYLFEPGNVDALAERLATVLSASPEEYRRMQDASLELVSAHDIERTLDTFEALYRGEQVVDPTTERHTATADRQESAD

SEQ ID NO: 8109 - protein, 430 aa, Halomonas shengliensis
MFTNTYLPIVGGVSESVQRLAVSLRELGHRVLVVAPRLDGQAETEEGVVRVAAVQHFNGSDFSLPVPIPGQLHEAVEAFDPDIVHSHHPFLLGDTAARTAETYGLPLVFTHHTLYEHYTHYVPGDSPRMQRFAVALATEYTRLCDEVIAPSESIRRLLIERGANAAISVVPSGVDMSRFAAGDGRAWRERLGIPEEACVVGHLGRLAFEKNLDFLARAVGLALERDERLHCLVVGEGEARPAMEACFDEAGVGARVHFTGRLQGQALIDAYHAMDLFAFASHSETQGMVVAEAMATGLPVVALDAPGVREVVRDGENGCLLEADDAEAMAAALAALVEPAARAPLAEGAERTAAAFDEARCAERCLEVYRRAIAAGGPFTHAEEGGWERVRHRLGAEWQMLRHRGRVLGKLVHATWEEERPDWWPGGPAK

SEQ ID NO: 8110 - protein, 933 aa, Unknown
  Description of Unknown: Nitrospiraceae bacterium sequence
MKISVSMITLNEEKNITRALSSCSFADEIVVVDGGSSDGTIEILKAHDKVVLIQSPWKNHFGRQRQVSLEHCTGEWVIRLDADEAFPQEFEEGIRKLLSSTPADVVGYNIHQCNLVGNEKYYSKIFDNYETNPRIWRNRPAIKWELQVHEILVGLSGTIAQWDVFVVHYGFLDKKRYWQKGEYYTQVPESGIYRQRPEKLFYREYDIQPRPPRSAVAPYVPEYKSEVDPDGMPEIAIVRGPNLNKPEVQNYESVSDKFNMTLYSGDRPNFDLAHIKLPVIKLPSDPEDPAFLKGLEFELFDKDIIFSADILWTFTEQAILAKHKFGKKVIALECENIPFAYEDDGLMREMKQFNRRFTDVFVAVTTRAKDALLLEGVPGEKIVVIPLGTDIERFSPDEAAGKRTRKNLGIAEEEKVVLFSGTIAWEKGIYDLAHAARLVTLEDSIKAVPLKFVIAGQGPESQNIKKCIKELGMDNIFTFIDCYPYHEMQELLNAADIFVFPSIPTKAWREQFGMAVIEAMACGTPVVSTVTGPMDEIVADAGTLVQPNDPTTLSAAIIRLLKDDPLRREFGKKGRERAVREYDSKKIALKFASLFERVFETTYKGALRELAEYTHLPVKDILNRIRSIYSRQVEEWRGLIGDKTTRDKVREFYRDTDSYLFDLVQYNYENLYYMKWTEDIFNFCAELKKQKGDLKILDFGGGIGSQLIALSALKNAELSYADIPGKTFEYAGWRFNRRHLAIDIIDATRGDFLAGRMYDVVITLDVIEHLVDPEAAVEYLLRHIRPGGHLIIVTSFVDNNGEAGWHLNVDRYTDDSFYNFIEKQGMEMLNEGRLPRYFRKPFEDPDDLRPQIYSAISEERFADARNLMETHLEMHLLDLGILVRHAEVCLKLGDCRAASESIEKVVMFSPDMPEAVEIAKEIRRRDNENTSCK

SEQ ID NO: 8111 - protein, 392 aa, Humibacter albus
MGADTFAPNVNGAARFAERLAAGLVERGHEVHIMAPAASRRHGTWYEEHEGARMLMHRLPSWRWWGHWLRFTLPWAIKGKSARVLDEVKPDVVHFQSHFVVGRGLSIEARKRGIRVIATNHFMPENLIDFAHIPHGLRQLAIDAEWKDAARILARAEAVTTPTKRAAEFLEQKTGLTRVYAVSCGINADEYTPSFEPRTSNRITFVGRVTGEKHIDVLVKAVAQLPDDLEATLEIVGDGDQLKNLEQLAEQLGIRDRVHFTGYVSDIELRQAYTRSTVLAMPSTAELQSIVTMEAMASALPIVAADAMALPHLVHDGENGYLFAPDDVHDLAAKLERVLRLPDDEFAAMKHESLKLIAAHDIQRTLNTFECLYRGEAVPDPVVDQSAPTTAD

SEQ ID NO: 8112 - protein, 365 aa, Unknown
  Description of Unknown: Chloroflexi bacterium sequence
MRVALIAPLVSTIAQPYPGGAQALLADLAQGLIRRGHTVTLFASDGSLVPGVSIEPVVVPESVRPANFSEPLQGRRADEGFFTQANLFLELFLQLQRRSADFDLVHVHAFDWPAFACSTLVQDIPVIHTIHLPAVSPEINAALRVLHRQGHPLTLITVSHACARTYGDYTPIDSVIYNGIDLDTIPFSPKASVEAPLLFAGRIAPEKGVEAAIDIAEKAGYRLLIAGGIYDRHYYEGRIVPKLRRAGERVTYLGHLDRLALWKIMGRSLGLLFPIEWDEPFGLAAVEAMAAGTPVIAYRRGAAEEIIGHGETGFLVEPGESAHAAALVDDLFDIPRVRCRAHVEAHFSLERMLDEYEAVYYDLAN

SEQ ID NO: 8113 - protein, 378 aa, Halanaeroarchaeum sulfurireducens
MSGRNSASTPPAVAAFTDTYLPTVNGVTYTISAWRDRWNTRGSRMDVVYPRSSYEPDDGEHPVTSVPFPFYDGYRLGLPQLPDAVRDVDVVHAHTPFLLGLSADRLARRESVPLVVSYHTPTAEYAEYLVPSWASSAVASLSRQYESWFLDRADLVLTPSAATASDVRRLTDAPVETHSNGVDVEFFRPTDSASFIRRHSIPDDRPIVGYTGRHGYEKNLDAIFEATADLDVTVVLAGDGPARESLEETAAALDVDAIFLGFLERENLPAFYSTLDVFAFPSPVETQGLVALEANACGTPVVAVDSGALSATVEDGITGYHFGPGDVAGFRNQIERALKNGDSLSQSCLDRRSEISLEMSMDRLEDTYERLLSSTDES

SEQ ID NO: 8114 - protein, 387 aa, Unknown
  Description of Unknown: Mycobacterium tuberculosis H37Rv sequence
MRVAMLTREYPPEVYGGAGVHVTELVAYLRRLCAVDVHCMGAPRPGAFAYRPDPRLGSANAALSTLSADLVMANAASAATVVHSHTWYTALAGHLAAILYDIPHVLTAHSLEPLRPWKKEQLGGGYQVSTWVEQTAVLAANAVIAVSSAMRNDMLRVYPSLDPNLVHVIRNGIDTETWYPAGPARTGSVLAELGVDPNRPMAVFVGRITRQKGVVHLVTAAHRFRSDVQLVLCAGAADTPEVADEVRVAVAELARNRTGVFWIQDRLTIGQLREILSAATVFVCPSVYEPLGIVNLEAMACATAVVASDVGGIPEVVADGITGSLVHYDADDATGYQARLAEAVNALVADPATAERYGHAGRQRCIQEFSWAYIAEQTLDIYRKVCA

SEQ ID NO: 8115 - protein, 403 aa, Rothia dentocariosa
MQQAKKILIGAETYPPDVNGAAQFGHRLATSMLKRGHEVHVVAANPSRGPSYRTVVEGGIVEHRLRSHLPPTHETNRICIPWEIHAEVGRILDEVKPDVIHVQCHYIIGRALLKQAHKRGIRVIATNHFMPANLDPFLPFPEPVKKVYAHITWADMRRLFKYAAVVTTPTQIGADAMRDLGRFTRPVMPVSNGIEISDYELAEGADLGKAPGELRVTFVGRLAEEKHVDVLIEALSLLPEDLDHVRLDIAGGGELRETLEQKARECGVENRVTFRGFVPDEELPGVYQRADIFCQPGTAELQSLVSLEAMSASTPVVLANALALPHLVEEGVNGYLFEPNNPQDLADKLTAILRLPAAEREQMGRESRRIVEFHSAENTWRTFEELYVSDAPYERFLAQRSEK

SEQ ID NO: 8116 - protein, 393 aa, Microterricola sp.
MGADTFAPDVNGAARFAERLAAGLVARGHEVHVMAPAASRKHGSWMEEHEGQKMMAHRLNSWRWYPHDWLRFALPWRIRQNSARVIDLVKPDVVHFQSHIIVGRGLSVEAEKRGIRIIGTNHFMPENLLEFTLLPKAWQEWAIGLAWKAARRTFGRAEAVTTPTAKAAQFLEQYTGLKGVHAISCGIDAHEYTPNFEPRTGNTVLFVGRVTGEKQIDVLLKAMTLLPAELDTKLHIVGGGDQMRNLQHLADSLGIGDRVTFRGYVTEAELRAEYTAATVFAMPSIAELQSIATMEAMASGLPIVAANAMALPHLVADGQNGFLFEPSNPTDLADKLRTVLEMAPAELTAMKQESLNRIVAHDIQRTISTFESLYRGEAVTDLVTNAAPAASSD

SEQ ID NO: 8117 - protein, 428 aa, Halomonas saccharevitans
MRLARGNALVLRRQAERGALQAWASSAQEAARPSSTDSHTLKILMISDVYFPRVNGVSTSITSFCAALKRLGHSVTLVCPAYPVGQTDTPGIWRISSRGVLGDPEDRMMHYRDVLALSSSQYAIHSFDLIHVHTPFVAHYAGITLGRRLDIPVVATYHTLFEEYLHHYVRWLPRPWLCFIARRLAVRQCHQLSAVIAPSRAMREALEHYGVTTPIAVIPTGLNLEAFTHPHEEHDFRTTYGLPPTARLLLYVGRAAHEKNIGFLIDMLPQVLAHHPNARLIITGEGPAQAALARRAREAGLEQFVHFLGYLDRDGPLQAAYRAADAFVFASRTETQGLVLLEALALGTPVISTAVMGTCDVLVDGQGCLIAEETHVDFAAKVNRILSDSTLREELVRRGPAHAARWHEDTQTAMLAKVYQRCVTLEVR

SEQ ID NO: 8118 - protein, 394 aa, Catenuloplanes japonicus
MRILIGAETYAPHVNGASYFAQRLADALTARHEVHVVSPSTGYRSFRRRAANGVVEHRVRALPVPTHPGFRFCAPIGLRQVAARILDEVLPDVVHVQSHFPLCRALVSEARARGLLVVATNHFMPENLTHYLPVGGGGRQVVHDWAWRDAARVFAAADAVTAPTPYAAALATMAGVPGPVLPLSCGIDLERFGPQVSASEFRLRHGVEDKPTVLYVGRLDAEKNLDVVIRAFALVREKADARLVLVGKGAERQNLEALAERLGVSGTVRFTGFVPDEELPSAYAAATVFVNAGTAELQSLVTLEAMAGGRPVIGADAAALPHLVIDDETGYLFPPGDSMALADRLLTVLGNPDLAESLGRSARAHAEKHDEAVTVAAFESLYAIRAARAAASVV

SEQ ID NO: 8119 - protein, 400 aa, Unknown
  Description of Unknown: Armatimonadetes bacterium CG_4_10_14_3_um_filter_59_10 sequence
MNIAFFSECYHPTLNGIVVSIDTFSQYLRRLGHRVHIHAPYYRGYHDDPPDVSRFPALRVPVVPQYPVPIPVGPRIAATFIHRRFDVVHTHSVFALSHVGASLAERTDVPLVSTFHTMLLDYLHYTFVPEQMTRPFVANLIRRYCNHCDLMIVPTAQVSDFLRKLGVVTEIQPLPTGIDVEFIRGGDRERVRKALGLPLDRKLLLYVGRLAREKNVTFLVDAVMHVLREHPGVDFAMVGEGPLKDDIREQVGASRLASRIHIVGGVSFEEVRDYYAAADIMTFASKTETQGLVVGEAMAAGLPVVAVRATGVSEFIASGEDGFLVDENPGAFVRTLSALLSSDSLRSSISTRARCKAQQFSAEASARRLEKFYQVLIASRKDFLQGSPGKRWGDHGSAAA

SEQ ID NO: 8120 - protein, 403 aa, Thermus tengchongensis
MRLYRVGLFTDVYFPNPNGVTTSVYLLLRELRRMGHEAWVIAPRHPEAPEGEEGVIRVPSVAYPFYEGQQIALPSARYLPTEFELIHTHTPLTLGVWGLRIARNKGLPHVSTFHTHYEKYAHYVPGLAILDKYTGIVPRLAKAFYNRVEVVIAPTEPVRRLAESYGIERPIRVIPTGIDNRLLEEAPLPSPSPWPEGKRRLITVGRLGKEKSFDVVLKAVAELAKKADVFLVHIGEGPELHALKHLAEALGIAERVRFLGPVPYGKIGGYYRMAELFLFASETETQGLVVWEAQAMGVPVVAVGAEGVLEGVEEGKTGYLVPPGDFQALAERALELLMDEEKRRRFSLQARAWALERSAERIAERIVAVYDEASEILRVEPKRLIFPFPRLPRSTLEDRPGGF

SEQ ID NO: 8121 - protein, 366 aa, Unknown
  Description of Unknown: Halobacteriales archaeon QS_8_65_32 sequence
MPGGPRVAAFTDTYLPTINGVTYTIRTWRDRWDERGGRMDVVYPGSAAYNAEGGEFSVPSLPFPFYDDFRLGAPAIPDAVRDCEIVHAHTPFGVGLGGLRLAWEAGCPLVASYHTPTAEYAGYLVEGWLRDVVARVGDAYERWFLERADRVVAPSESASEALRERGIGPVSVVPNGVDIDRFAPVDPSSFRARHDLPGGPLIGYTGRHGYEKRLADLVDAAAGLDVTLVLGGDGPAREAVKTRASQAGVDARFLGFLDRAELPEFYSALDVFAFPSPVETQGLVALEAIACGTPVVAVASGALVDTIEAGETGYHYAPRDTAGFKTALRRALADREALCEACLARRESVAVERAIDDLEAVYDAVR

SEQ ID NO: 8122 - protein, 407 aa, Nocardiopsis sp.
MTRTDRVLRVLIATDTYPPDVNGAGYFTHRLAEGLAGRGHRVHVICPSDHGDPYVAVNNGVTEHRLRSAPIPLQESMRMAVPLGIGGHTARLVARLDPDVVHVQSHFPVSRTALRRGRAAGVPVVFTNHFMPENLYAHAHLPQGAHTVAGSIAWRDMVRVAAAADHVTAPTPRAARLLREKGFARVVEAISCGIDLERFHPREGERATARARFGLPDRDTIVFVGRLDVEKRIDDTIRALARVAPEHDAQLVLAGTGQRERELRALAAELGIADRVSFLGFVPDEDLPLVFATGDVFAIAGVAELQSIATLEAMSSGLPVLAADAMALPHLVEEGRNGFLFPPGGVDVLADRLRTVLGPGDRRRAMGEASREMALRHDHHRSLERFESVYASLGAPAPLRLERVVAA

SEQ ID NO: 8123 - protein, 413 aa, Unknown
  Description of Unknown: Cryobacterium sp. MLB-32 sequence
MPGNTAPEVAPQAKKPIRVLIAADTFAPDVNGAAKFAERLASGLVSRGHEVQVMAPSATRKYGTWTEMHEGQPMTVHRLHSWRWYPHDWLRFALPWLVRRDSRRILDTFRPDVVHFQSHINVGRGVTIEAEKRGMRIIGTNHVMPENMLKFSLVPLGLQDRVIKAAWRAARRTFGRAEAVTTPTRRAAQFLEKYTGLTGVHAISCGIDADNYSPNFEPRTENRILFVGRVTGEKQIDVLLQAAALLKPELNAQIEIVGGGDQKRNLEHLAETLGLTPRITFTGYVTDEELREAYSRATVFAMPSIAELQSIATMEAMASGLPIVAADAMALPHLVHDEQNGFLFKPGNAQDLADKITRILELSPDSLEALKSESLNLIAAHDIRRTLNTFECLYRGEPVTDTVTNGASSHSSE

SEQ ID NO: 8124 - protein, 393 aa, Pseudonocardia dioxanivorans
MRPLRILIGADTFPPDVNGAARFAERLASGLAGRGHDVHVVAPSPDATAHREPARPGADGVRVHRVRSHRYPLHETFRVCLPWQASPATAALVADLAPDVVHVQAHFVVGRGTAVAASRAGVPLVATNHFMPENLFGHARVPAALQQAAARWAWRDLARVFSRASVVTAPTERAAGLLADAAGIDGVLPISCGIDSARYAGGVESPTPTVLFVGRLDEEKRVDELLRAVAALPTGLGARLEIVGDGSRRAAWTALAGELGLAERVMFHGFVDETTLVEAYRRCTVFAMPGIAELQSLVTLEAMSAGKPVVAADAMALPHLVRPGRNGWLYTPGDVEGLAAALGALLADPATRARMGAASREIVAGHALDATLDRFEEVYARAAGRVEMPVRAA

SEQ ID NO: 8125 - protein, 414 aa, Nocardiopsis sinuspersici
MAQFDRPLRVLIATDTYPPDVNGAGYFTHRLAEGLARRGHRVHVVCPSERGEPYVTVNGEVTEHRMPSAPIPFQPSMRAALPLGLGGHLARIVQRMDPDVVHAQSHFPVSRAALRKGRAAGIPVVLTNHFMPDNLYAHARVPAPMREAAGTLAWRDMIRVAGEADYVTTPTPRAARLLREKGFARTVEDISCGIDLERFRPRAGDRAAARRRFGLPDRDTIVFVGRLDEEKRIVDTIRALARIVPERDAQLALAGTGQREEELRALAAELGVADRVFFLGFVPDEDLPLVYAAGDAFAIAGVAELQSIATLEAMSTGLPVVAADAMALPHLVEEGRNGFLFPPGDDARLADRLLTVLGPERDRLAMGAASREIALRHDHRRSLERFEDTYRRLRGAPPVPLWVERAVAERAVAV

SEQ ID NO: 8126 - protein, 272 aa, Escherichia coli
MKLYTQIRKRAPQARVVIHMHNAFEPKLLEQNVKMIVPSLYLKKYYQSYLANADIEIVPNGIDLETYQSNFQPITRSELNISPEEKIIFYAGRIVPDKGILLLMQSFEKLAAAHKNLKLVVIGDYTEMSKSDKGAYQRNVREIAKRLKDRCIMLGSIPPEKMHCYYPLADLVVIPSQFQEPFCMVAIEAMGAGKPVLVSTRGGMTEFVKKNTTGFHLKEPMTADSISSDILKTLANPELTAVAKQGQDFVFEHYSWDGVTQRFEEVIHNWFE

SEQ ID NO: 8127 - protein, 394 aa, Unknown
  Description of Unknown: Candidatus Lumbricidophila eiseniae sequence
MGADTFPPDVNGAARFAERLASGLVARGHEVHIVAPASSRIYGTWTEIHGGEALTAHRLRSWRWYPHDWLRFALPWSIRRNSARILDEVRPDVVHFQSHIVVGRGLSVEAEQRGIRIVGTNHFMPENMLAFTLIPRAWQDFSVKLAWKAASRTFGRAAAVTTPTRRAAEFLERSTGLTGVYAISCGVDVPQYWPNWEARTENRVLFVGRVTGEKQIDVLLHATALLLRDSVDLTVEIVGDGDQKRHLENLAVTLGVADRVTFTGYVTDEELRAAYHRASVLAMPSIAELQSIVTMEAMASALPIVAANAMALPHLVHDGENGYLFEPGNAADLAAKLRKVLDAPPAEYRALKEESTRLIAAHDIQRTLSIFERLYRGSPMDDPPIDESSIASDA

SEQ ID NO: 8128 - protein, 437 aa, Nocardiopsis potens
MERAPRTSGPESRRTTGRDRRLRVLIGTDTYPPDVNGAGYFTHRLATGLAERGHDVHVVCASEEGAPGIAYDGEVTLHRLRSAPVLVHPTMRTAVPLGIAGHVARIMDRLAPHVVHAQSHFTVSRATVRQGRISGTPVVLTNHFMPDNLFAHAHIPERLQGLAGRLAWRDMVRVANEADYVTTPTRRAADLLAQKGYDRPVEAVSCGIDLERFHPRPAERAGARAGFGLPDRETMAFVGRLDEEKRIDELIRALPLVHRERDLQLVLAGTGQREAELRELAAGLGVADRVHFLGFVPDEELPRVYVAADLFAIGSVAELQSIATLEAMSTGLPVVAADALALPHLVDRGRNGYLYRPGDVAGLADRLLAVLGSGREAMGAASREIALTHDHRRSLARFEEIYTGVRPTRGGPQGPVPGRGGAAPGRPARPRRHPVPA

SEQ ID NO: 8129 - protein, 433 aa, Halomonas anticariensis
MFTNTYRPIVGGVSESVQRLKNRLQAEGHRVLVVAPKMRGQPRREKDVVRVAAVQHFNGSDFSLPVPIPGQLFEAIEDFDPDIIHSHHPFLLGDTAARAADTYGLPLVFTHHTLYEHYTHYVPGDSPRMQRFAVALSTEYTRLCEAVIAPSESIRDLLLRRGANVNITVAPSGVDTRRFGRGDGTMLRLRLGIPRGAYVVGHVGRLAKEKNLPFLAEAVARLLQWQRDAHFLVVGDGDARECMQQEARRYGVESRFHFTGRLQGQALIDAYHAMDVFAFASHSETQGMVLVEAMAAGLPVVAITAPGVREVLRDGSNGRLLMHDDSMGMTMALDDLADPERRRSMSVAAHGVAAMFDESRCAARCLEVYRRAIAVGGAFSHADDNTWERVRSRLGAEWHMLLHRGRVLRSLLQDEPSDRATGIDSEIHDTAPK

SEQ ID NO: 8130 - protein, 375 aa, Haloferax larsenii
MQSVAAFTDTYLPTVNGVTYTIQTWRERWHRRGGRMDVVFPRDDEYTPEPGEYGVRSLPFPFYEGLRIGAPRVPKAVEDADIVHAHTPFGLGLAGLRLARRKNIPLVATYHTPTAEYAEYLSSIGAIERGVERTAERYERWFFDRADAVIVPSEDAKRRLRHVLGVDSDVVVLSNGIDVEQFSPVAGDDFRERYDLGSGPLVGYTGRHGYEKELDELVRAAADLDATLVFGGDGPARDDLEALAADLDVDARFLGFLDREELPAFYSALDVFGFPSPVETQGLVALEANACGTPVVGVDAGALEDTVVDGRTGYHYEQGDTEGFSRAIRRALDERETLSSNCLDRRDEVSVEHSVDRLATLYDRLTANKKARRKR

SEQ ID NO: 8131 - protein, 428 aa, Unknown
  Description of Unknown: Verrucomicrobiae bacterium Tous-C4TDCM sequence
MKIAMFTNTYLPHVGGVARSVNTLEEACRARGHEVRVVAPEFDDAVPSPHVLRVPAIQHFNGSDFSVRLPVLNVVRDFMEDFKPDIIHSHHPFLLGDSALRESWKMRVPIVFTHHTLYERYTHYVPLDSPALKRVAVQLATEYCNLCDQVIAPSESMEHLLVERGVTRPILTIPTGIDTAFFAAGDGARFRDQVGIPRDAKVIGHTGRLAREKNLMFLAEAVAPCLAADPRAVFLVVGDGDARPELLEYLRKHAGEDQFHFTGSLSGPALADAYAAMDCFVFASQTETQGLVLAEAMATGMPVVALDGPGVREIVRDGENGLLLDGHASARDFSAALRRLMEDPELTLVCSRNARATAADYDTGRCVARVLECYTKLIADYPGRMEEDPTAWDRLLSGIEIEWSLLVGKMSAAAAAVSETPATEDLLD

SEQ ID NO: 8132 - protein, 393 aa, Unknown
  Description of Unknown: Cryobacterium sp. Hh39 sequence
MAADTFAPDVNGAARFAERLAAGLVARGHEVQIMAPAASRKHGSWMEMHEGQPMMVHRLHSWRWYPHDWLRFALPWIVRRESRLILDSFKPDVVHFQSHINVGRGVSIEAEERGIRMIGTNHFMPENMVKFSLIPLGFQDRVIKAAWRAARRTFGRAAAVTTPTLRAAQFLKKYTGLTEVHAVSCGIDADNYSPNFEPRTENRILFVGRVTGEKQIDVLLQAAALLAPSLKAQIEIVGGGDQKRNLEHLADTLGIRSRVTFTGYVTDAELRAAYSRATVFAMPSIAELQSIATMEAMASGLPVVAANAMALPHLVHDEQNGYLFAPGNAQDLADKLTTVLTADAANLEALKRESLKLIATHDIKRTLNTFECLYRGEPVALLVADDAATHATD

SEQ ID NO: 8133 - protein, 394 aa, Kocuria marina
MADPPTEHKALRILITAETYPPDINGSAQFARRLAHGMLERGHEVHVAAPMPTSGPSRIMDDAGVTEHRFRSHHAFTHPYFRLCFPWEIAREVARVFDDVRPDVVHVQCHYILGRLVVREAVRRGVRVVGTNHFIPENIEPFLPFPQWFVRGYRKVSWRDIARVYGRCDVITAPTPLAVRTMVDNGVPDRAIAVSNGIQAGDYEAAAGERIEHPDHPVVLFCGRLAVEKNVDELIEAVALIPRQKNVHAEIVGEGEQLDRLVNLAHERGVADRVHFLGFLTDEQLRTAYLRADVFCQPGTAELQSLVTLEAMSASTPVVLANARALPHLADEGRNGYLFSPGNPGDLATKLQLVLDAPPEQRRAMGERSRDMVSRHSFAKTLDTFESLYRGAAR

SEQ ID NO: 8134 - protein, 334 aa, Unknown
  Description of Unknown: Candidatus Rokubacteria bacterium sequence
SLKVVRYPSIPVTTYPEFALAVPYSRRIDRMVASLEFDVIHAHHPFLLGPAARRLARRTRRPLVFTYHTRYEKYAHYVPLPLGLVQAAALRLSAGFAAQADAVLAPSAVIRDELHARGVRTPIAVVPTGVDLELFRPGDRAAARRGLGVGEGEPLVLYVGRLDREKSVDRVLVAFERVASTVPAARLVLVGHGTEAERLRRLAGSLPVAQRIRFVGLRPHDSLAECYQAADVFLFASETETQGLVLAEAAACGLPAVAVDAPGCDEVVRDGDTGVLTKGDPTALAEAVIGLLLDPERRRAMARRARENAERLFDVRLQIDRTMAVYADAVARFR

SEQ ID NO: 8135 - protein, 640 aa, Desertihabitans brevis
MAVRRRVRCAGCAAARQRPAAGPGLGGATGGGDGGPTQRAADRPADPGAAAGEGVGGGGGHTAGCRRVRPADRRQRRQRGARLHPRARGQRRRRRPLPGARRRRHPGSRTLAHPAVGQRRRLRLRAGLGLRQGPLPHPRCRHAADLTAGVGHGPGDGAGLRAGGLDDPARLPRRVAGGRGRRADRDRPGGRRPDRSVPAGRGRLRAAGPGGDARLRTGRHRRCGRPLQPPPRGGQAPSARRVEPEHLVKILIAADTYAPQINGAARFTERLAEGLARRGHDVHVAAPSPDGRPARQRVRGITVHHVRSYRYPRYERFRLGGPWRTAAQPLVDELRPEVVHIQAHFTVGRAFAAAAVHRGIPVVGTNHLMIDNVFDHLPVPGFARGWVTRTVWRDIGRVFGQASVVTTPTPSAVQLLTEATGLQALAVSCGIDNHSFAEASGRWAPAKEAADWVPTVLFVGRLDPEKRVDELLRAFAQLPADVPARLEVVGHGSCGAQLRAMAERLGVTDRVTFHGVVTDEELVEAYGRADLFCMPGVAELQSIVTLEAMAAGRPVVAADAMALPHLVRPGRNGYLYTPGDVEELSGHLRRLLADPALRARMGRESETIVAGHTLDATLARFEDIYCQVTRGRIVRLRRAA

SEQ ID NO: 8136 - protein, 424 aa, Mesorhizobium sp.
MNILMLTNTFTPYIGGVANSVTWLAENLRAAGHRVLIIAPEFDGAPEDEIDVLRIPALQRFGGSDFSVPIPLSRSLDEALGVFQPDIVHSHHPFLLGDTALRVSATRDLPIVYTYHTRYELYGHYVAQDSPALKRLVLSLALGYCDLCDAVIAPSQSMAQFLTEHGVKTPVTVVPTGIDATRFDHGDGKRLRSASGIPSDAFVVGHVGRLAPEKNLEYLTEAVKQFLTSHAGAHFLVVGCGETMAHIQDTLTGAGLGSRVHLVGALTGTELADAYAAMDVFAFSSHSETQGLVLVEAMAAGIPVVALDAPGAREVVTDSRNGRLLPANSPADHFAHALHWVVGRSVAERKTLREAAIQTSKRFSNDATTKMALTLYASVLKAHRAARASKDNNWQAAKRGLGEEYKILRNLAHAIGEAVLTSAS

SEQ ID NO: 8137 - protein, 430 aa, Halomonas muralis
MFTNTYRPIVGGVSESVQRLKSRLQAEGHRVLVVAPKMKGQPRHEPDVVRVAAMQRFNGSDFSLPVPIPGRLYEVIEEFDPDIIHSHHPFLLGDTAARAAETYGLPLIFTHHTLYEHYTHYVPGDSPRMQRFAVALPTEYTRLCDAVIAPSESIRDLMRQRGANDSVHVVPSGVDTRRFSRGDGTRLRAQLGIARGDYVVGHVGRLALEKNLPFLAEAVTRLLRRQPDAHFLVVGDGGARDAMQAVAIHAGVAERVHFTGKLHEQALIDAYHAMDVFAFASHSETQGMVLVEAMATGLPVVAVNASGVREVLANGNNGLLLPNDDAETFADMLASLNDAQRRAVLRDGALATAANFDETRCTARCIAVYRRAIAAGGPFSHADDGAWERVRSRLGAEWQLLRHRGRILRWVFQDEPVISFETNESKAPQK

SEQ ID NO: 8138 - protein, 419 aa, Kocuria sp.
MLPPVDVDDRPVPDGGALTVLVVAETYPPDVNGSSQFSRRLAQAMAGRGHRVHVAAPRPGRGHSIRRMDGHVTEHRFRSHTAFTYTTFNFCFPWEIRGEVNRLLDEVQPDVVHVECHYILGRFMATEARKRGIRLIGTNHFIPENIEQYLPLPSLIRRMYRRISWRDMAGVFRNCDVVTAPTPLAVESMKRHGFDFPVYALSNGIQAENYELREGEAPPHSDRPTILFVGRLDPEKHVDVLIKALARIKDDTDAVLEVVGQGGEFEKLAGLAEQLGLGDRVRFRGFVSDEDLRLAYLGADIFSQPGTAELQSLVTLEAMAASCPVLLANARALPHLVDPGVNGWLFTPGDDAEVADKLLAFLHLPEDRRRDMGLASHKLVEEHSFDATVEAFERMYRGADPERLLANWPMLEPLETPLG

SEQ ID NO: 8139 - protein, 381 aa, Unknown
  Description of Unknown: Hydrogenophilales bacterium CG_4_10_14_0_8_um_filter_62_70 sequence
MTLRILTVSDVYFPRVNGVSTSIETFRQVLTEHGVTMQLVVPRYGDEVEQAGIVRVGARTLPRDPEDRLLAWGETRRTVLSEAMDCDLIHIQTPFVAHYAGLKAARRLAKPVLATYHTLFEKYLSHYAPFLPEEWLRGAARRFSRTQCNDLDTVIVPSTAMRDRLTEYGVTVPIHILPTGIPLSRFAQGDRARFRELHRIPETQPVALFVGRVAHEKNIAFLIDAVAEACRTVPELLFLITGEGPAEKALRRQAETLGIAAKVRFLGYMDRQHELPDCYAAADVFIFASRTETQGLVLLEAMAMGLPVVALAAMGTKDILGPGRGSIAPPDDVTEFAAAINRMIQDQVLRQRLSVEAREYALEWADDRMAGRLAALYRSLS

SEQ ID NO: 8140 - protein, 368 aa, Halorussus sp.
MHRVAAFTDTYLPTVNGVTYTIASWRDRWERAGGRMDVVYPNADGHRPNDGEHPVGSLPFPFYDGFRLGTPKIPKAVRSAEVVHAHTPFAIGLGGLRLARDRDLPLVASYHTPTAEYAEYVSPTDAVASLVERVSEAYERWFFGRADAVLVPSTATRDHLRDAVGVETRVEVVPNGVDTERFRPVETEKFLARYDLDGDRPLIGYTGRHGYEKRLPELVAAASEMDVTVVFGGDGPAREDLREQAESLGADARFLGFLDREELPAFYSALDAFAFPSPVETQGLVALEANACGTPVVGANAGALADTIEDGETGYHYESGNITDFQDAIDRTLDEREQLRETCLVRRDAVSVDHAVEKLRSVYESLRS

SEQ ID NO: 8141 - protein, 394 aa, Pseudoglutamicibacter cumminsii
MTQETPLRILIACDTYPPDVNGAAVFCYRLATNLTKRGHEVHILAVRNDRGPSFVEHRPEATVHRVTSHKAPTHETYRLVTPYSANKVAGRVMDEIKPDVVHIQCHYMIGHAAQKQATKRGIRLIATNHFIPENLEPFLPFPQWFLNIVSRNSWRDMGKIMGKAAVVTTPTPLAARAMRENAGLTDVLPLSNGINSAHYEMRENETLPQRDYQTVLFVGRLAVEKNIDVLLRAIARLNQHPRPHVRIVGEGEQRPKLEALAAELGIEDRVHFLGFVDDETLRQEYLCADVFCQPGTAELQSLVTLEALSASRPVVLANALALPHLVDEGVNGHLFTPGDDQDLAEKLASILDLSPAERKAMGEAGHQMALKHGEEKTIKTFEALYRGADVHDYL

SEQ ID NO: 8142 - protein, 367 aa, Halorussus salinus
MERVAAFTDTYLPTVNGVTYTIASWRERWERAGGRMDVVYPNADGHRPNDGEHPVGSLPLPFYDGFHVGTPKVPKAVRDAEVVHAHTPFNIGVGGLRLARKKDVPLVASYHTPTSEYAEYVSPTDSIASLVGRVSEAYERWFYGRADAVLAPSEATRDHLKSAVGVDTPVEVVPNGIDTERFRPVETDEFLARHDLRGERPLIGYTGRHGYEKRLSELVAAAADMDVTVVFGGDGPAREDLEEQAESLGADARFLGFLDREEMPAFYSALDAFAFPSPVETQGLVALEANACGTPVVGANAGALADTIDHGETGYHYESGNIDDFRDAVHRTLADRDDLRERCLARRDEVSVEHAVEKLHDVYDRMR

SEQ ID NO: 8143 - protein, 399 aa, Nocardiopsis sp.
MTERPLRVLIASDTYPPDVNGAGYFTHRLAEGLAGRGHRVHVVCPSERGEPHVTVNGAVVEHRLRSAPIPFMRAAVPLGMGGHIARIVERLDPDVVHAQSHFPLSRAAMRRGRAAGVPVVLTNHFMPDNLYAHARIPAPMQELAGLLAWRDMVRVAGEADHVTTPTPRAARLLREKGFTRGVEAISCGIDLERFRPHEDPAAARRRFGLPDRDTIVFVGRLDAEKRIDDTIRALARIVPGRDAQLALAGTGQRGEELRALAAELGVADRVFFLGFVPDEDLPLVYGAGDAFAIAGVAELQSIATLEAMSTGLPVVAADAMALPHLVEEGRNGFLFPPGDPALLADRLLLVLGPRGRALGAASRELARRHDHHRSLERFEEVYTRLRGTAPARGERPVAA

SEQ ID NO: 8144 - protein, 367 aa, Natronococcus amylolyticus
MVETVAAFTDLYLPTVNGITYTISLWRERWSGRRASMDVVFPKIDGYEPNDGEYAVPSIEAPLYPRYRLGRPTPPDDLDVPDVVHVHTPFSLGVAGVRFARANDVPLVASYHTILEGRVPDLVSNSLVEPGRRLCRAYERAFFARVDHVIVPTAFARRHLRESVGADVEATVVSNGIDTDRFRPTDPGPFRERYGLPDGPLLGYTGRHGPEKNLEEAIDAVAGTDCTLVLAGDGPAREGLERRAAETGADARFLGFLDREELPAFYSALDAFVFPSPVETQGLVALEATACGTPVVAADAGALIDSVIEGETGYRYEPGDLEAFRWAIRRTLAENDRLSDLCRRRRAMLSVEHSLEQLARVYGGLQG

SEQ ID NO: 8145 - protein, 380 aa, Auraticoccus monumenti
MNGAARFTERLAEGLARRGHDVHVAAPSLTGRPSRQVVRGVTLHHVRSFRYPLYERFRLGAPWRGAALPLVDELQPDVVHIQAHFTVGRAFAAAASHRGIPVVGTNHVMIDNIFDHLPVPRLARGWVSRTVWRDIGRVYGQASVVTTPTPRAVDLLTEATGLQALAVSCGIDAAPFKDASRRWAAASQAPDHVPTALFVGRLDPEKRVDELLRAFAQLPASLPARLEIIGHGSCRPELDAIAKELQVGSRVVFRGVVTDEELVEAYGRADVFCMPGVAELQSIVTLEAMAAGRPVVAADAMALPHLVEPGRNGWLYTPGDVEELAGHLATLLGDRALRRRMGRESEVIVARHTLEATLERFEEIYDEVTHGRIVRLRPAA

SEQ ID NO: 8146 - protein, 729 aa, Unknown
  Description of Unknown: Nitrospirae bacterium sequence
MKISVSMITLNEAQHIKRALSSCTFADEIVVVDGGSTDGTIEILESFDKVKLIKHPWEGHFGKQRQISLEHCTGDWVVRLDADEVFSEEFENGIRGLLESTPPDTLGYRVRQCNLIGDENYYSKTFDQYEASPRIWRNLKEIRWEKHIHEVLVFEGLTGNIDTWDVYVIHYGFLDRKKYWEKGKFYSNIKESGFGCPEELYYREYDIQPRPSRARVSSHVPPFVMEGEKRGLPRIAIIRGPNLNPWEMQNYEPLVGQFDITAYTTTKPNFDIDKIKLPVVKVPSHPEIPAYMMGLEFALFDSDLIYSADTTWPFSYQAVLIKEKFNKPLICLQWENIPFAYEENEQMRLMKKKVREGADFFIAVTERAREALLLEGVSPEKIIVLPMGININRFRPDRTTGLEVRNEFGIRPSEKVVLFVGRAVWEKGIYDLIYAIKLTEGYLKDAEIRAVITGRGPELETVKERVRELGIFDRFIFIESYPYHKIHKLFNMADIFVLPSISLRSWKEQFGMVLIEAMACGTPVISTLSGSIPEVVGDAGLLVQSNDPHSLADAIIDLIKNDDKRLELGKKGRERVESNFSSEKISQKFGDLFRYILNEYRKSKGRSITMENLGSDDNNGYYKQERRDVEALIPGDAKYILDIGCGEGLLGKRLLERGAKEVVGVELREDICKRAEKNLSRVICGNIEELELPFENGYFDCIILADILEHLREPGLTLKKLKGYLSQDG

SEQ ID NO: 8147 - protein, 439 aa, Halomonas sp.
MSQRRPRTLSDAEITALTHLANGNALYRQREAERKARLSSALALFHPAAPAVETPSLGLKILMISDVYFPRINGVSTSIASFRGSLERLGYSVTLICPDYLVGQVDEPSVLRIPSRQVPGDPEDRMMRYRDILALAPTLAGEAFDLIHVHTPFTAHYAGVALGRRLNIPVVATYHTLFEEYIHHYIRWVPRRWLRFAARRLSTHQCQQLDALVAPSQAMQHALSRYGVTTPTTVIATGLALESFCKPQDTNDFRSYYGLPQQARLLLYVGRAAFEKNIDFLIDMLPKVLTEHPTTRLIIAGEGPAHDSLVQRAQEVGVAESVLFIGYLDRSGPLQAAYRAADVFVFASRTETQGLVLLEAMALGTPVVSTAMMGTRDVLKEGEGCLIAGDHHEDFAAKVNHLLSDETRRQQLAKRAQTYAASWHEDTKSAELVAMYQKL

SEQ ID NO: 8148 - protein, 365 aa, Halarchaeum sp.
MQPRVAAFTDTYLPTVNGATYTVRTWRERWQARGGRMDVVYPDADYEPDPGEHPVASLDFPFYEGYRLALPHTPRGVVTPDVVHAHSPFAVGLAGYRYARRQDAPFVVSYHTPTSEYVEYLAPDALVAPLERASERWERFFLDRADLVLAPSERTCAHVRDLGVTTSVEALSNGVDVEFFAPTESAGFRERHGLGDGPLVGYTGRHGYEKRLRDLVDAVAGLDATLVVGGDGPARDDLEARARERDVDARFLGFLDREELPAFYSALDVFAFPSPVETEGLVALEANACGTPVVGADAGALVETVDDGETGYHYPVGDVDAFRDAIRRALDERASLSEACVARREEVSVSRAIDRLEAAYARVLD

SEQ ID NO: 8149 - protein, 464 aa, Unknown
  Description of Unknown: Candidatus Rokubacteria bacterium sequence
MTPSTRSTRGPRTRSRWRCASARRSTSTRTSSARPRASRCPRRPSRRRPTIRSSSGSGCRTSSRRTSRSSTRPERAGPVRVALFTNNYLPFCGGVPTSVETLRAGLEAAGHEAWVFGPRFATGAEAAPRVVRYPSIPAATYPEFALAVPYSRRAARLVAALDVDVFHAHHPFLLGPAARRLARRHGRPLVFTYHTRYEKYAHYVPLRRQFVETLAVRLSTRFAARADAVIAPSAVIRDELSTRGVASPIAVVPTGLDLERFRPADRRAARARLPVPADAPLVLYVGRLDPEKSVDRILLAFERVASTVSAAHLILVGHGTAAHRLQRLAGTLAASDRVRFVGVRAHAELAQYYQAADVFLFASETETQGLVLAEAAACGLPAVAVSAPGCEEVVRDGETGVLTKGDPMALGDAVIGLLLDAERRAVMSLRARQTAERLFDVRLMIERTLAVYAAATARVTHPVP

SEQ ID NO: 8150 - protein, 394 aa, Unknown
  Description of Unknown: Micrococcales sequence
MNSRPLKILIGADTYPPDINGAAQFGHRLAVGMRDRGHEVHVIAGRSSDGPSYDIEIDGIHEHRLRSHNPPTHPYYRLCFPWEMQRRVGKILDEVQPDVVHIQCHYIIGRMISWACKRRGIRLVSTNHFMPENLNPFLPFPDIALKVIAYCSWKDMGRVLGRADYVTTPTPIGAQAMHDHGFGAPVIPVSNGIDAARYELAPGEEVKKRDHPVVFFAGRLAVEKNIDVLIRAVALLPADLKVHLELAGTGEIEDELKRVAREAGVEDRVHFLGFVSDAELREGYLRADVFCQPGTAELQSLVSLEAMSASRPVVLANALALPHLVREGENGYLFEPGDPQDLSEKLTAVLTASDEERRRMGEVSHEIVQKHSVEKTWDAFEAMYRGEYRGPEGR

SEQ ID NO: 8151 - protein, 418 aa, Unknown
  Description of Unknown: Microbacterium sp. Leaf436 sequence
MTTSATPADHPVSDDAHDPAVSRETPAPAERPLTVLIGADTFLPHVNGAARFAERLAAGLVARGHDVHVAAPSIGRGHAGTATEVIEGQPMTLHRLPSYRFLPHDWLTFVWPWRAKHYARLMLDQIRPDVVHIQSHIIIGRGLAREARKRGIPVIATNHVMPENILDFTTLPDFLDRIMLKLAWADAKRTFVMTRAVTTPTRRAADFLQATIGIEGVIPISCGIDRSNYTPDLEPRDANRILFVGRLTTEKGIDVILRAMTKIDPALDVTFDIVGGGDQRRNLEQLAEQLGLAHRVTFHGHTSEEELRALYSRASVFAIASIAELQSIATMEAMASGLPIVAANAVALPHLVHDGENGYLFEPGNADELAARLTDVLTAAPDERRRMQQASLDGVIVHDIGRTLDTFEALYRGRPLPE

SEQ ID NO: 8152 - protein, 425 aa, Unknown
  Description of Unknown: Acidipropionibacterium virtanenii sequence
MRILIGTDTYPPTVNGAAQFTRRLAHGLAARGHQIHLACPSPTGAPGRMIDEAGVVVHRFRSFRYAGYQDFPVALPAGLRATAGQLLDDAGPDAVHVQSGFFLGRALLVEARRRGIGIVATNHLMPANVLDHLPCPQALRPAMATALWRDLRRVYLQADAVTSPTRRAVDLMYANTGIDGLAVSNGIDLDRYRRIPRVMSGGPVVLFVGRLDPEKHLEDAITAMALLPDDVPGRLEIVGAGSARAGWERLAGDLDLDPDRVRFLGKLPDDELLEAYGRASVFAMPGTAELQSLVTLEAMATGMPVVAADAMALPHLVHDGENGFLYRPGDATALAGRLATLLGDAGLRHRMAEEGRRIVAPHGIEHTLDTFEGLYRQVRRLTPLSSRTTGRQPAGRVADRQASDRPSRPAAMAELIAMPPAVSAR

SEQ ID NO: 8153 - protein, 453 aa, Halomonas subterranea
MPQRRRPPLNAPLSDQDVAALTHLANGNALYLQREADRKARQESALALLHSTTSTANAQPGCMKVLMISDVYFPRVNGVSTSIASFRGALERLGHSVTLICPDYPLGQLDEPGVLRIRSHRVPGDPEDRMMRYRDLLALTPQLAGKAFDLIHVHTPFTAHYAGVALGRRLGLPVVATYHTLFEAYVQHYIRWFPRRWLRLAARRLSAHQCHQLSALVAPSQAMQHALTRYGVTTPTTVIATGLALEAFCSPQLGSDFRAHYHLPREARLLLYVGRTAFEKNIDFLIDMLPKVLAEHPTTRLIITGEGPAQDSLVRRAQALGVAESVLFLGYLDRSGPLQAAYRAADVFVFASRTETQGLVLLEAMALGTPVVSTATMGTLDVLKEGEGCLIAEENHSDFATKVNQLLSDETRRAQLAERGQTYAASWHEDAKSAELVALYRKLAAERLANARK

SEQ ID NO: 8154 - protein, 382 aa, Unknown
  Description of Unknown: Microbacterium sequence
MGCDTFFPDVNGAARFSERLAAGLVQRGHDVHVVAPNQAYRRKAPGIEIIEGEPMTVHRLPSVRWPPHDWLRFVWPWRTKHYARQVLDAVKPDVVHIQSHIVIGRGLTREAAKRGIPVVATNHVMPENILDHTTLPAWMDALLVKWAWADANRTFQMTSAVTTPTRNAANFLEAAINITGVVPISCGIAASNYRPDLTPRDRNRVLFVGRLTREKQIDLLLEAIVTLDPALDVQVDIVGGGDQRKHLEQLAERLGLADRVTFHGRVEEEELRALYSRASVFAMPSVAELQSIATMEAMASGLPVVAADAMALPHLVHDGENGYLFDPASAADLAAKLTTVLTAAPDERRRMQEASLEGVRIHDIDRTLRTFESLYRGQPVED

SEQ ID NO: 8155 - protein, 393 aa, Agromyces sp.
MGADTFAPDVNGAARFAERLAAGLAERGHDVHVMAPAANRKHGSWTEIHEGQAITAHRLRSWRWYPHDWLRFALPWRIRQNSAKVIDRVKPDVVHFQSHIIVGRGLSVEAEKRGIRIVGTNHFMPENMLEFTLLPKAWQDWAVGLAWKAAGRTFGRAESVTTPTLRAAQFLEKHTGLTGVHAISCGIDAHKYSPNWEPRTENRIVFVGRVTGEKQIDVLLRAAALLPAELDAKIEIVGDGDQKRNLEHLAAQLGIADRVTFTGYVTDEQLRDAYHRASVLAMPSIAELQSIVTMEAMASALPVVAANAMALPHLVHDGENGYLFEPSSPEDLAAKLRTVLEASPDHYRALKEGSIRLIAAHDIQRTITTFEALYRGKPVADPVTDGATAALPE

SEQ ID NO: 8156 - protein, 429 aa, Allosalinactinospora lopnorensis
MSVTIPSAPSSGARARTATPSRAGSACLRVLIGTDTYPPDVNGASFFTARLAAGLAERGSDVHLLCPAPDGRPRAVRHGDVLEHRLRSVPSLVHDTVRLAVPLGVPGHVDRLLARLRPDVVHLQNHFVVGRLLLRAARRHGVPVVATNHFMPENMFNYLHVPVPLRNRIGRLAWRDFARVLAETDHVTTPTRTAAQLLVDQGLQRPVEAVSCGIDTYRFRPMWEEADGSILTSRARFRAHFGVPDRPTFAFVGRLDEEKHIEDLVSAVARITVDGAQLLLAGTGAQRRRLERLAADEGVADRVHFLGFVSDDDLPLVYRAADVFAIAGTAELQSIATLEALASGLPVVAADAMALPHLIEEGHNGYLYRPGDIDGLAARLSRLLASPEERAEMGAAGRAIASRHRYQRSLVRFEQIYHDLTGSPTASTG

SEQ ID NO: 8157 - protein, 414 aa, Rathayibacter iranicus
MSDSRDEFPSESPDSRPLTVVIGCDTFAPNVNGAAKFAERLAAGLAQRGHEVHVVAPSADGWSGTRVETHEGQRIILHRLYSWRWFPHDWLRFAMPWRIRQNSARILDEVKPDAVHFQSHIIVGRGLGIEAAKRGIRIVGTNHFMPENMLEFTLLPKAVQAKAVQMAWRAARRTFGRAEAVTTPTRKAAQFLEKYTGLQGVRAISCGINADNYTPDFTPRSRNSILFVGRVTGEKHIHVLLRAVALLDPSLDVTLEIVGGGDQMRNLQQLASTLGIAERVRFTGYVSDSELKEAYTRASVFAMPSIAELQSIATMEAMASALPVVAADAMALPHLVHDGENGYLFEPGSAEALAERLTTALTLAPEAFEAMKRASLRIVAAHDINRTISTFESLYRGEPVADPVAVVASARAAS

SEQ ID NO: 8158 - protein, 381 aa, Pseudonocardia oroxyli
MRILLGADTFAPYVNGAARFAERLAAGLAGRGHEVHVAAPSPTGAAGVGRFGDVAVHRVRSHRYPWHESFRVCLPWEAGPATAEILRRVRPDVVHVQAHFVVGRGLAAAAAASATPLVATNHFMPENLFAHARVPRFLRSAAARWAWRDVRAVFGRADAVTAPTPRAVALLTGATGLAASAVSCGIDAARYAGGDERPDTVLFVGRLDQEKRVDELLRAVARVPGARLEVVGDGTERGAWHRLAAELGIADRVVWHGFVSEEDLVAAYRRCAVFCMPGIAELQSLVTLEAMAAGKPVVAADAMALPHLVRPGRNGWLFAPGDVEALAVRLAALLADAGTRRRMGTASREIVAGHTLDATLDAFEDLYVRVAHVPSAGPVAA

SEQ ID NO: 8159 - protein, 411 aa, Nocardiopsis ganjiahuensis
MAQPNRSLSVLIASDTYPPDVNGAGYFTHRLAEGLAERGHRVHVVCPSEQGDPYVTAGGRVTEHRLRSAPIPFQPSMRAALPLGMGGHIARLVRRLDPDVVHTQSHFTLSRSALRRARTAGIPVVLTNHFMPDNLYAHARVPRSMQRAAGSLAWRDMIRVAAEADHVTTPTPRAAELLRDQGFAREIEAISCGIDLERFYPRARDRAAARARFGLPERDTLVFVGRLDEEKRIDVTIRALARIVPERDAQLALAGTGQREGELRALAAELGVADRVFFLGFVPDEDLPLVYAAADAFAIAGVAELQSIATLEAMSTGLPVVAADAMALPHLVAEGRNGFLFPAGSSVLMADRLLAVLGPDRERAALGRASRELALEHDHHRSLERFEAVYTRVMGRGRGRVRPEAERVMVA

SEQ ID NO: 8160 - protein, 399 aa, Ornithinimicrobium pekingense
MSRPGARRRAVRPRRVLLLSDCYRPTVNGVVTSIDELRKGLIEAGHDVRVLTVGPVRRTTFDGSVYRLPSVDARHIYPQARLGRPVDAETFADLVAWRPDVLHSHTEFVAFWWARRLAHRLGAPHVHTYHTLYADYTHYFFPHQRTGRALCAGFARQTLNRTTTVIAPTAKVEQLLRGYDVRVPIAVVPTGVDLSRFTPGPPSQTLRDSLGLTPGIPVILSLGRLAAEKSVTEVVDLLARVRDEPWQLVVAGDGPQAGTLRQQVERLGLNDRVRFVGAVDPAHVPDYYRLADVFVSASRSETQGLTFLEALASGVPVICRDDGSLDGVVLDGYNGRRYREPEEFVAAMTWLLRDPALRRRWSSGAVQTASGFGRAAFVDAVCATYDRARGCVGTARWAA

SEQ ID NO: 8161 - protein, 409 aa, Nocardiopsis sp.
MVQSNRPLRVLIASDTYPPDVNGAGYFTYRLAEGLADRGHRVHVVCPSEHGDPHVTVNGKVTEHRLRSAPIPFQPSMRAAVPLGMGGHISRLLWRMDPDVVHAQSHFTLSRSALRRGRAAGIPVVLTNHFMPDNLYAHAHVPRPMQRAAGSLAWRDMVRVAAEADHVTTPTPRAAELLRERGFAREIEAISCGIDLDRFHPRARDRAAARDRFGLPERDTVVFVGRLDEEKRIDDTIRALALTVPERDAQLVLAGTGQCEGELRALAAQLGVADWVYFLGFVPDEELPLVYAAGDVFAIASVAELQSIATLEAMSTGLPVVAADAMALPHLVEEGRNGFLFPPGNHVHLADRLLSVLGSKRRRQEMGRASREIAQEHDHHRSLERFEAVYRGLQGRGLGDPRSERVMVA

SEQ ID NO: 8162 - protein, 441 aa, Unknown
  Description of Unknown: Brevibacterium sp. Mu109 sequence
MRWPPRSAAPTASTAPLWAPETTTRCPILLADDPTPPSPGAHREDRPLRIVIAAETYPPEINGAGAFANRLATGLAANGHEVHVIAPSASGIPSHDWEEGVRVHRIVSHHWPLHPTWMICMPWETGPAVAQLLDDIRPDVLHTQAHFVIGRFAITHARRRGIPVVATNHFMPDNVRPYVRAPRRVLDTAARLAWWDLRSRFQRADHITVPTQLASDLLTENGFDRPIEAVSCGIDLARFDGADPAPEAASTTAPAVLFVGRLSQEKRPQDIVEALAAMDPALGLEARIVGAGDQEEVLPQLARDLGVGDRVKVLGKISDAQLDEEYRRATVFCMPSTAELQSIATLEALASGLPVVLADAVALPHLVRDGENGGLFRPRDAQDLARVLTRVVSASDQERRAMGAVSQEIAAHHDIRRTLARYEEIYRSVSAGSPEAPSLQG

SEQ ID NO: 8163 - protein, 419 aa, Catenuloplanes japonicus
MRILIGADTYAPHVNGASYFAQRLAAALNVHHEVHVVSPATGYRSRTRTTEGGIVEHRIRSLPIWQRRDFRFSLPVGLHAAAGRILDEVRPDVVHVQSHFPICRALIAAAYARGIFVVATNHFMPENLTHYLPLARDLVHDWAWRDAARVFAKANVVTAPTPYAAALAMVAGVPGPVLPISCGIDLTRFSTRGDAAGFRARHDLKDTPTIGYVGRLDAEKNLDVLVRAFAVVRRMTDSQLLLVGTGARERALRALAAELGVADDVRFAGFVPDDELPDAYAACTVFVNPGTAELQSLVTLEAMACGRPVVGANSAALPHLIVDGETGCLFPPGDVRALVRRLLSILDDPAHADALGRNARAVAEQHDESRTVAAFAQLYGIARVPAGPARQPGPVLLNGGDRNGHARGTGRADTGRRAA

SEQ ID NO: 8164 - protein, 402 aa, Streptosporangium canum
MVMSAAPALAPAPLATRPRRVLIGTDTYPPDVNGAAYFTHRLAGGLAERGNEVHVVCASEEGAARTEHVNGVTVHRLRSAPVLVHPTMRISVPTRLDRLMAAIAPDVVHVQGHFVVGRAAISAARRAGVPVVATNHFMPDNLFQFAHIPGPLRERAGDLAWRDFRRVFSRADRVTTPTRIAAGLLTGKGFARSVEPVSCGIDLSRFQPHAEPKAWARGAFGLPDRDTVLFVGRLDEEKRLDELVRALPYILNGTDAQLALVGTGGQRAALERLAARIGVGDRVFFLGFVPDEALAQAYAAADVFAMPGVAELQSIATLEAMATGLPVVAADAMALPHLVRPGENGRLFRPGDVQGLARHLNDLLCSPGLRGAMGAASRAIALTHDHQASLARFEAIYQEVTR

SEQ ID NO: 8165 - protein, 371 aa, Unknown
  Description of Unknown: Candidatus Rokubacteria bacterium sequence
MLGGVTRAVETIRASLEALGHSVLVVAPRMAGALPQPGVLRVPAVPAPTYPDFALPLPVGPRLTRALRALDLDVFHAHHPFLLGGTAGRLARSLGRPLVFTYHTLYDKYAHYVPLPRAAVARQALAWSTRFANQADVVIAPSEALAERIRSQGVARPVEVVPTGIDLGWFQPGNRTDARAALGLAPDRPLLVYVGRLDREKNLDFLLEAFAAVLRVRPDAELLLVGRGTRELSLRATTARLGVAHRVRFVGGVPPADVVAFYQAADVFVFASTTETQGLAVLEAMAVGRPVVAVRASGVEEAVMDGVTGLLTAEDSSAFAAAVTEILEDAGLAAKLAGGGREVARRFAAPVLAARLVGIYRRLLGADSVPD

SEQ ID NO: 8166 - protein, 407 aa, Azoarcus sp.
MNILMVSDVYFPRVNGVSTSIETFRRSLHQQGVRSTLIAPAYPGGGADDDGVLRIPSRFVPLDPEDRMMRSGHIAARADELAGEGFDLIHIHTPFVAHYAGLALARKLRLPCVATYHTFFEEYLFHYVPTLPRSWLRALARRFSRTQCNALHAVIVPSRAMAAALLDYGVERPLEILPTGIPPDQFQGGDGRFFRSRYEIPADARLLLFVGRVAHEKNIGFLIEMIDHLRHTEPRALLLITGEGPALATLRNAVAQRGLERHVRFLGYLDRHSELHDCYRAADLFVFASRTETQGLVLLEAMALGTPVVALAQMGTCDILEGETGCRIGPDDPAAFAALVASLLSRPELLERLAEEARQRARHWHADDIAARLVRLYARWIDASGSPRRVPELTAGSAGRRRLTSRS

SEQ ID NO: 8167 - protein, 391 aa, Unknown
  Description of Unknown: Microbacterium ginsengisoli sequence
MSDRPLTILIGCDTFSPDVNGAARFAERLAAGLVARGHDVHVMAPSITHRDHGPRVEVIEGENVTVHRLPSWRWYPHDWLRFVWPWLAKHYARQVLDAVKPDVVHIQSHIVIGRGLARIASQRGIPVIATNHVMAENILDFTTLPPLLDRLFVKLAWDDARRTFDLARAVTTPTKRAADFLVAAIDLQGVIPISCGIDAGNYTADLEPRTENRVLFVGRLTREKQIDLLFKAVALLDPALDVHVDIVGGGDQRKQLELVAHEQGLDGRVHFYGRVDDDELRRIYTRASVFAMPSIAELQSIATMEAMASGLPVVAADAMALPHLVHDGENGYLFDPTSAEDFAAKLTTVLTADAAERRRLQQASLDGVKVHDIQRTLSTFEKLYRGEPVEA

SEQ ID NO: 8168 - protein, 399 aa, Arthrobacter sp.
MSYPADTKPLTVLIAADTYPPNINGAAQFGYRLAKGMAARGHNVHVLAPNPANGRSYTEEPAGAWTVHRLRSHSVPTHDYWRICLPWEIKRDISMLFDRVNPDVVHIQCHYMVGEYTLYEAVKRGIRVVATNHFMPENLNPFLPFPEWFKRIVAKNSWRDMGRVMGKADAVTTPTPLAAKAMHDHAFLRQVLPISNGIDSAAYEPRPGEQLPPREHPTVLFVGRLAEEKHVDVLIDAVAKTPAELDVHLEVIGGGEVKHALQAQAARLGISDRVRFLGLVSDEELRLAYLRADIFCQPGTAELQSLVTLEAMSASTPVLLANAMALPHLVADGENGYLFTPHDSDELGRRITELVTLPDADRERMGKASRSLVEKHSLETTLETFERLYYGLSVEVELA

SEQ ID NO: 8169 - protein, 408 aa, Nocardiopsis sp.
MTTDRVLRILIATDTYPPDVNGAGYFTHRLAEGLAQRGHRVHVLCPSERGEPYVTVNGGVTEHRVRSGRIPVHDAMRFALPLGLSGHADRLVSRLDPDVVHVQGHFTVSRAAIGRARAARIPVVLTNHFMPDNLYGYVRLPEVLHQATGALAWRDMVRIAAMADHVTTPTPRAARLLLEKGFARQVEDISCGIDLERFHPRPEERTALRAEFGLPDRDTIAFVGRLDVEKRIDDTMRALARIVPERDAQLALAGTGQREQELRDLAAELGIADRVHFLGFVPDEALPRVYAAADCFTIASTAELQSIATLEAMSTGLPVLAADAMALPHLVEEGGNGFLFPPGDISRMSELLLEVLGSPERRRSMGEASRRLVARHDHHRSLERFEAVYESLLVSPPVRSKVQRTMAA

SEQ ID NO: 8170 - protein, 367 aa, Halorussus amylolyticus
MQRVAAFTDTYLPTVNGVTYTVESWRDRWVRDGGRMDVVYPDANGHTPAETEHPVKSLPFPFYDGFRLGTPRIPSDVRDAELVHTHTPFAIGLGGLRLARNRDLPLVASYHTPTSEYANYVSPTDAVASALGRVCESYERWFLEHADAVLAPSAATRDHVRDEVGVDTPVEIVPNGVDVERFRPVEADDFRASRGLDTGRPLIGYTGRHGYEKRLSELVAAAAGMDVTLVFGGDGPARADLERQAESLGADAHFLGFLDRDEMPAFYSALDTFAFPSPVETQGLVALEANACGTPVVGANAGALANTIDDGETGYHYESGDIDDFRAAIRRTLAERDELREACLARRDEVSVERAVERLADVYRRVR

SEQ ID NO: 8171 - protein, 368 aa, Unknown
  Description of Unknown: Halobacteriales archaeon SW_6_65_15 sequence
MSYRVAAFTDTYLPTVNGVSYTIASWRERWERSGGQMDVVYPGADGHSPADGEHPVGSLPFPFYDGFRLGTPRVPEAVRDAEGVHAHTPFSLGLGGLRLARARDLPLVASYHTPTSEYAAYVSPTDAIASLVGRASETYERWFFRRADAVLAPSAATRDHLQNEVGVDTTVEVVPNGVDVERFRPVEPDDFLDRYDLRGDRPLIGYTGRHGYEKRLSELVEAAALLDVTVVFGGDGPARAELERRADDLGADARFLGFLDREEMAAFYSALDAFAFPSPVETQGLVALEANACGTPVVGANAGALANTIDDGETGYNYESGNVEDFRDAIERTLAEREELRETCLARRESMSVEHAVEKLQDVYDSIR

SEQ ID NO: 8172 - protein, 366 aa, Natronomonas moolapensis
MWTVAAVTDTYLPTVNGVSYTVRTWRERWRRRGGEMPVVYPATAARSPDPGECPVPSVPFPFYTGFRIAAPTVPGSVRERGPDVVHAHTPFALGIAGRRLAAALEVPFVVSYHTPAAEYAGYLSDALEGPIRRIADGYERLFLSGADAVIAPSRDAAESLRANGTPTHVVSNGVDTERFRPVDDGTVRAFERRYGLLDRPLIGYTGRHGHEKRLGDVLDATADVDAAVVFAGDGPARPGLERRAAGRDDVSFLGFLDRSELPAFYSALDAFVFPSPVETQGLVALEAIACGTPVVAAAAGALTETVIDGETGTHFPPGDTAALEGAIERTLRGSERLPTRLEERRRRLCVDRSIDDLEAVYESVLE

SEQ ID NO: 8173 - protein, 349 aa, Komagataeibacter europaeus
MRGVMRVLHIMAARGNGGAELYSTDVMLSLHMAGLTQRVVMHPAALRSRELRHAGMAVETGPLRLPLRPLIRHALHRLIERMQPDLIHCWLRRAAELVPAHTGVPVIGWFGNYKDLRPFAHCDWFVGCTPDMAESMRERGAPPDRVAYVPTFPSVMPQAPVSRQSLGTPDDAPVLLVLSRLHPAKGLETLLDALPLLPRCHVWLAGEGELKAALAAQAARLGIADRVHFLGWRSDRGALLAAADICVLPSRYEPFGTVILDAWSADVPLVACAAAGPRAHVRDGDNGMLVPIDDAPALTTAMQRVLDDPALAARIVAGGRRDYEARFTRQAVTAQWLALYERVLSARGR

SEQ ID NO: 8174 - protein, 369 aa, Halolamina sediminis
MESVAAFTDTYLPTVNGVTYTVQSWRDRWRERGGRMEIVYPDSPDRAPEADEHPVRSLPLPIYAGYRLGLPRVPDAVTDVDVVHAHTPFSLGLAGMRLARSRDLPLVATYHTPTSEYASYLSSWGPIRKRTAALSRRYESWFLNRADAVIVPSAATGEYVATELGVDDPQVVPNGVDTERFRPVDSAAFRERHGLPDDRTLVGYTGRHGHEKSLPAILAACDRLDRDVTVVFGGDGPARTKLEEAARKRDVDARFLGFLDRDELPAFYAGLDAFLFPSPVETQGLVALEAFACGTPVVGVDSGALSDTVDDGGTGYHFEPGDIDGFAAAIERTLDERVRLRENCLDRRASISVEHAVDRLAEIYAAVRE

SEQ ID NO: 8175 - protein, 424 aa, Unknown
  Description of Unknown: Deltaproteobacteria bacterium sequence
MNILMVTNVFTPHVGGVAKSVRGFTDEIRRIGHRVLVVAPSFEGAPEREEDVIRVPAVQNFNGSDFAVPMPITGRIASALKTFSPEIVHSHHPFLLGDTALRVAASREVPAVFTHHTMYEEYTHYVPGDSPKLKRFVVDLATGYCNLCDAVVAPSETVAELLSRRGVGVRIEVIPTGVDLRVFESGGGGDCRRRSGIPEDAFVVGHVGRLAPEKNMEFLAEAVAAFLSRNANARFLLVGEGPSKRAMLAAFDASGLSGRIHTAGVLEHRELAAAYKAMDVFAFASLTETQGMVLAESMAAGVPVVAVDAPGAREVVRDRENGRLVPRAEGRAFVEALQWIADREPGERRRLAAGAARTASGVSMPRMAAKLLALYESLAVTRRAPKAIEASPWTSARKLIEEEWKILRNIAHAAGEAVLPGSAE

SEQ ID NO: 8176 - protein, 398 aa, Arthrobacter sp.
MTDQSGAKPLKIMIAADTYPPHINGAAQFGYRLAQGMLKRGHEVHVVTFRASTGPSSSAREDDAMVHRLRSHSVPTHEYWRICLPWEIKDDISRYFDEVQPDVVHVQCHYMVGKAVLEEAERRGIRMVATNHFMPQNLDPFLPFPKWFKRIVAKNSWRDMGRVFKRAAAVTTPTPLAAKAMHEHAFLRKVLPVSNGIDAADYELKPGEEIEDLDHPVVLFVGRLAQEKHVDVLIEAVAKTPADLNLHVEVVGGGEVRAALEARTAELGMSNRVRFLGSISNEELRRAYLRCTIFCQPGTAELQSLVTLEAMSASKPVVLANAMALPHLVDEGGNGHLFTPGDSDELARKLTSIMALPDSEREAMGKASREMVNIHSIDETLSTFESLYRGDPVKKEAV

SEQ ID NO: 8177 - protein, 402 aa, Unknown
  Description of Unknown: unclassified Microbacterium sequence
MTTPATPAPSPSPDRPLRVLIGADTFLPHVNGAARFAERLAAGLVARGHDVHVMAPSDGHRNTGVFTEVIEGEPMTMHRLPSWRFLPHDWLTFVLPWRAKHYARRVLDDVKPDVVHIQSHIIIGRGLAREAKKRGIPLIATNHVMAENILDFTTLPDFLDRIFVKLAWADAKRTFALTRAVTTPTRRAADFLESTIDIHGVIPVSCGIDRSNYTADLEPRDANRILFVGRLTSEKGIDVVLHALAQLDPALNATFDVVGGGDQRRNLEQLAAQLGVVDRVTFHGHASEEDLRSLYTRASVFAIASIAELQSIATMEAMASGLPIVAANAVALPHLVHDGENGYLFEPGDADELAARLTDVLTAEPDERRRMQQASLDGVRVHDIGRTLDTFEALYRGRPIPE

SEQ ID NO: 8178 - protein, 412 aa, Unknown
  Description of Unknown: Brachybacterium sp. YJGR34 sequence
MRPAERPADDQQRPLRVLITTDWWEPVVNGVVASVQTLRRELLALGCDVRVLTLSQGIRARNEPGVYRIGSVSAAVVYDRARIGMPASRHVLRDILRWRPDVIHSQAEFSTYVWARRIAKTLSVPLVHTYHTIYEDYTHYYSPSRTVGRKVVGSFSRRVLAGTDAVIVPTAKVARLLRGYGVRRPVHVVPTGLDLQRFRPAETAAERDDVLALRESLGIGADQKVLLSVSRLAKEKNLEEVLEMLAASPRQDLVLVLVGDGPYRDELEDRAATLGVTDRVRFTGQVDPAEVPRWYRAGDVFVSASLSETQGLTFIEALACGLPLLCHRDPSLASVVLEGRTGWQYEETAQFSAHLDELLDDPARRARMSAAALEHARATCGAQEFGRAVLEVYQQARRRRTARLSAPQAAAA

SEQ ID NO: 8179 - protein, 402 aa, Unknown
  Description of Unknown: Brevibacterium luteolum sequence
MTETEQSTAPADRTTLRICIPTETYAPEVNGAATFAQTLATGLAARGHEVHVICPSATETPSTAWEDGVLVHRIRSHRWYLHPTWTICMPWETKPEVSRLLDLIRPDVVHTQAHFVIGRYALSESRKRGIPVVATNHFMPDNVRPYVNASKRLLRYGSAAAWWDLRRSFEKADYLTVPTQLSADLLTENGFRSSIQAVSCGIDLSHFFAADDVDQTHPTVLFVGRLSLEKNIGDIIAALAAADPSLNLHAEIIGAGSEAEPLRAQAAELGVADRVRLRGKVSDEELVKAYQEATFFCMPSTAELQSIATLEAMASGKPVVLADAVALPHLCRHGENGYLFEPRNIEALTDAFTRLLTMSAADRQQMGDASRRLVARHDVRHTLDTFESIYRQVIAEAQSAAG

SEQ ID NO: 8180 - protein, 368 aa, Haloferax mucosum
MQSVAAFTDTYLPTVNGVTYTIQTWRERWQRRGGRMDVIFPDDDTYDPEAGEYAVRSLPFPFYEGLRIGAPRIPKAVESADIVHAHTPFGLGLAGLRLARRRNLPLVATYHTPTAEYAEYLSSVGAIERGVERTAARYERWFFDRADAVIVPSEDAKRRLTDEVGVDADIAVLSNGIDTEQFAPVEGDAFRRRHGLGDGPIIGYTGRHGYEKHLDELVRAAADLDVTLVFGGDGPARDQLERLADTLGVDARFLGFLDREDLPAFYSMLDVFCFPSPVETQGLVALEANACGTPVVGVNEGALEDTVADGMTGYHYESGDLEGFRHGIRRALTEHDDLSENCLARRDEVSVEHSVDKLAALYDRVMAR

SEQ ID NO: 8181 - protein, 394 aa, Leifsonia aquatica
MGCDTFAPDVNGAARFAERLSAGLVEHGHDVHIVAPAASRKHGTWIEEHEGQKLTAHRLRSWRWYPHDWLRFALPWTSKANARRVLDEVKPDVVHFQSHIVVGRGLAYEAQKRGIRIIATNHVMPENIIEFTRLPKFLHQTFVDIAWRDARKSFDRAEAITTPTQKAAQFLEKATGLRGVHAISCGIDAQNYTPDFTPRTANRILFVGRVTGEKQIDVLLKAITLLPASLDAQLEIVGGGDQFKNLQAMAESLGIGDRVTFLGYVTDEELRAAYTRATVFAMPSIAELQSIATMEAMASGLPVVAANAMALPHLVHDGENGHLFTPGDAQDLADKLESVLTLPQEELDVLKNASLRIVASHDIQRTISTFESLYRGEPVADPVTDSADSVPSPE

SEQ ID NO: 8182 - protein, 417 aa, Leifsonia sp.
MPDTSGPHPTPPAPAAQKPLTIVMGCDTFAPDVNGAARFAERLAAGLVERGHDVHIVAPAASRKHGTWVEEHEGQKMTVHRLRSWRWYPHDWLRFALPWMSKANARRVLDEVKPDVVHFQSHIVVGRGLAYEAEKRGIRIVATNHVMPENIMEFTVIPKFLQKVLVAVEWRDARKSFDRAEAVTTPTRRAADFLEKATGLRGVHAVSCGIDAHNYTPDFTPRNANRILFVGRVTGEKQIDVLLNAVKLLPESLDARLEIVGGGDQLKNLQAMAETLGIADRVDFLGYVSDEELREAYTRATVFAMPSIAELQSIATMEAMASALPVVAANAMALPHLVHDGENGHLFRPGDAQDLADKLENVLTLPQDELDVLKNASLRIVASHDIQTTISTFESLYRGEPVADPVTDAARSVPASE

SEQ ID NO: 8183 - protein, 370 aa, Unknown
  Description of Unknown: Candidatus Halobonum tyrrellensis G22 sequence
MQTVAAFTDTYLPTVNGVTYTVQSWRRRWNARGGRMDVVFPGAPGYDPEAGEYTTRSVGFPFYEGFRFGLPGVPDAVRDADVVHAHTPFALGLSALALARRTDTPLVASYHTPTAEYADYIAKGAVATGVESVARRYERWYLDRASAVVAPSGPARDHLADIGTRTPIEVVPNGVDVDFFRPVDEETRAAFRERYGLPDGPLVGYTGRHGFEKELDAVVPAVDAADADATLVFGGDGPARERLTEQAAERGVDARFLGFLPREDLPAFYACLDAFLFPSPVETQGLVALEANACGTPVVGVDAGALEDTVVEGVTGYHFARDDEAAFAAAIDRTLAERETLSANCLDRREDTSVEHAVDRLAEVYDGLSG

SEQ ID NO: 8184 - protein, 404 aa, Unknown
  Description of Unknown: Microbacterium telephonicum sequence
MTPTATPEPHPSGGHRPLTIVIGADTFAPDVNGAARFAERLAAGLAGRGHDVHVVTPSVGHRNHGVFTEHIEDQDLTVHRLPGVRWYPHDWLRFVWPWRSKHYARKVLSAVKPDVVHSQSHIVIGRGLTRIAHQRGIPVVATNHVMAENILDFTTLPPLLDKVVVKLAWEDAKRTFDMSRAVTTPTRKAAEFLEATIDIDGVIPISCGIDKRNYTPDLAPRAHSRVLFVGRLTTEKHVEVVLQAVAKLAPELPDITFDIVGGGDQRRALEQWTQKLGLNDRVTFHGRVDEAELRASYSKADVFAIASIAELQSIVTMEAMASGLPVVGANAVALPHLINDGVNGYLFEPGDVDDLADKLRRVLTASPEDYLGMQQASLQGVEIHDIEKTLDTFEKLYRGEPLDA

SEQ ID NO: 8185 - protein, 427 aa, Kocuria palustris
MLPELPLDGVPEPVDGRLRVLVVAETYPPDINGSSQFSHRLAQAMAGRGHDVHIAAPRPSKGRTMTRMDGAVTEHRFRSHTAFTYDTFHLCFPWEVRGEISRLMDELRPDVVHIECHYILGRYFAKEAQSRGIRLIGTNHFIPQNIEQYLPLPDPLRRLYRRFSWRDMASVFRRCDVVTAPTPLAVESMRANGFDFPMHALSNGIDAAQYDLKPGEVLPPRDRPTVLFVGRLDPEKHIDVLLRAVASIADRSDVGVEIVGQGGEYDRLAELAQQLGIADRTVFRGFVSDEELRVAYLRADAFCQPGTAELQSLVSLEAMAASSPVLLADARALPHLVDEGVNGWLFPPGDHEQLGRLLLRLLELPEDQRREMGAASRRMVAEHSFSATIDVFEQLYRGVDPDLLLGSWPQTGPLPIVPPASGPGSGD

SEQ ID NO: 8186 - protein, 444 aa, Halomonas salina
MNVLMFTNTYLPIVGGVSESVQRLKRQLQAAGHRVLVVAPRMSGQPEHETDVVRVVAMQYFNGSDFSLPVPIPGQLHEAIEAFDPDIVHAHHPFLLGDTAARAAETYGLPLIFTHHTLYEHYTHYVPGDSPRMQRFAVALATQYTWLCDEVIAPSESIRDLLLGREANPRISVVPSGVDTARFASGEGQRWRDRLGIPASAYVIGHLGRLALEKNLAFLSEAVAETLVSKPDAHFLVVGEGEARDDIQALAKARGVAERLHITGRLQGQALIDAYHAMDVFAFASHSETQGMVVAEAMATGLPVVAVDAPGVREVVVDGRNGRLLAEDDVAAMADALGALADPEIRRPLAEAALETAAGYDEARCAERCLAVYRRAIARGGPFTHADEGGWERMRYRLGAEWQMLCYRGRLLRHLVQEEWEQERPAWWPGHRAEGKRKSEVPRE

SEQ ID NO: 8187 - protein, 391 aa, Micrococcus lylae
MIAADTYPPDVNGAATFCFRLATALHERGHDVHVVAARNDDGPDFVEHRPEATVHRLKSWRPPTHEYYRLVFPPLARRAMRRIMAEVQPDVVHVHCHYMIGAAAITEAERRRVRTISTNHFMPENLEPFLPFPQWFLDRYSRYSWWQMGRLMGKGAVVTTPTALAARAMAERAGLQNVLPVSNGIDASKYEQAAGEVITPHAHPTVLFVGRLAVEKNIDVLLRAVAHLKDTRPELDVHAEIVGDGEQRDVLRELVVELGIEDRVAMRGHVTEEELHTAYLRADVFCQPGTAELQSLVSLEAMSASKPVVLADALALPHLADDGVNGYLFVPGDHEDLAEKLARVLGASPEERVRMGEASHAKALRHSAQKTVDIFEALYRGATPAEVRARL

SEQ ID NO: 8188 - protein, 426 aa, Unknown
  Description of Unknown: Desulfobulbaceae bacterium BRH_c16a sequence
MNISMFTNTYLPHVGGVARSISTFAEDLRKAGHRVQIVAPTYAGLEEVKEKDIVRVPAFQNFNGSDFSVRIPFTGVINRAITDFRPDIIHSHHPFLLGDTALRVARSLDLPLVFTHHTLYEKYTHYVPFDSDALKRFVIQLATEYANLCHRVIAPSTDVKKLLISRGVQTIMNVLPTGIDVDFFKNGDGKRFRREHGIPEDTMVIGHVGRLAKEKNLPFLAGAVARALRKYGNACFLVAGKGDAEPEIKEIFEEQRLDKRLIMAGSLTGNNLADCYAAMDIFAFASLSETQGLVLAEAMAAATPVVALSASGVNDVMKDGVNGIRLEENTSEGQFGDALAQALADRKQLLSWSRNAFETAKTFSREKSTETLLQLYTKTISGVQNSQVAEIDVLDGALLAIKTEWELLQEKTAAALNSFSEVRKER

SEQ ID NO: 8189 - protein, 424 aa, Nocardiopsis sp.
MSTSFAPHPPTVTGPAPSGGGRRRSRVLIGTDTYPPDVNGAAYFTARLVRGLTERGVDVHLVCPSPTGPPHVVERDGVVEHRLRSMPSLAHESVRLALPTGVRGHLNRLLDRLRPDAVHIQNHFLVGRMLTGAACDHGVPVVATNHFMPENLFDHLRMPWPLRPYAARLAWWDLNRILGRAEHVTTPTPTAARLLREQGFVHTVEAVSCGIDLDRFRPLPEDSEVDERRRLRARFGLPDRPTMLFVGRLDEEKRIDELVRAVARTSDVQLVLAGQGSHRERSAELARSEGVADRVRFLGFVAHEDLPDVYRCADVFTIAGIAELQSIATLEAMASGLPVVAADAMALPHLVEEGRNGHLYEPGDPDGLADRVESVVTSERNRARMGEHSRLMASRHRLEDSLKRFERIYEDASVGAFASFSGGR

SEQ ID NO: 8190 - protein, 456 aa, Halomonas sp.
MSQHRRHPLSHPLSESEIASLSQLANGNAITQQREAERESRLASALTLFHSTTPATAMPLGGMKVLMISDVYFPRVNGVSTSIASFRGALERLGHSVTLICPDYPVGQVDEPGVLRIPSRGVPGDPEDRMMRYRDLLALAPSLAGETFDLIHVHTPFTAHYAGVALGRRLGLPVVATYHTLFEEYIHHYIRWLPRRWLRFAARRLSVHQCQQLDALVAPSRAMQHALAHYGVTTPIMVIATGLALEAFCHPQGAQDASDFRAHYDLPTDARLLLYVGRAAFEKNIDFLIDMLPQVLVEYPTTRLIITGEGPAHETLVKRAQEIGVADAVLFLGYLDRNGPLQAAYRAADVFVFASRTETQGLVLLEAMALGTPVVSTAMMGTLDVLKEGEGCLIAEDTHDDFAAKVNRLLGNEPLRQQLAERAQTYAASWHEDAKSVELVELYQQLAVDRCERIGR

SEQ ID NO: 8191 - protein, 427 aa, Pseudoclavibacter bifida
MTKPLRLLIAADTFPPNVNGAATFTVNLASGMAARGHDVHVVAPAASRRHGTWTEEYDGQQITVHRLPSDRYYPHDWLRYVKPWRARHHMRRVLDEVQPDVIHYQSAVVLGRAAVREGAGRGIRIIGTNHLMLENMGDHTLLPNFLQNIAAKIWWHDAHKTFAETEALTTPTRRAANFLEENGQLEGVLAISCGLRTTDYTPRFEPKTPRSILFVGRVTGEKQIDVLMRAFQQLNNVPDLRLEIVGGGDQKENLQKLSRELGIDDRVLFHGYVTDQELRKIYSDATIFAIASIAELQSIATMEAMASGLPVVAANAMALPHLVHEGENGFLFEPGDVGGCATALRTMLEMPREEREQFGRRGLEMVQVHDIDRTMELFERLYYGEDPVSVGKDSWNEQDHSLDDVVEPVTGALPIIRKPESNAQDGE

SEQ ID NO: 8192 - protein, 426 aa, Nocardiopsis dassonvillei
MSTSFASPAVAAPPRPAVGATRRTRVLIGTDTYPPDVNGAAYFTARLARGLAARGARVHVVCPSPEGAPYTAERGGVVEHRLRSVSSLVHDSVRLAVPLGVRGHLDRLLDRVRPDAVHIQNHFLVGRMLAAAAHARGVPVVATNHFMPENLFDYVHVPAPLRPHAARLAWWDLGAVLSRAEHVTTPTPAAARLLVDQGFTRPVEPVSCGIDLDRFSPLDGGAATRRRLRARLGVPDHRTVLFVGRLDEEKRVDELVRAVALTDGVQLVLAGHGAHRARLEELAAEVGAADRVVFLGFVPHADLPDVYRCADVWAIAGTAELQSIATLEAMASGLPVVAADAMALPHLVEEGGNGYLYPPGSPGALAARVESVVADEGRRLGMGARSRDMAELHRLEDSLERFERIYREASAGAGAGAGAGATRSGR

SEQ ID NO: 8193 - protein, 811 aa, Unknown
  Description of Unknown: Candidatus Rokubacteria bacterium sequence
MQLRLPPHRRRACRRVSRARRARRRGQPAGRARERALAVPLRAGRHRLSQATAAAGRHLPVVRPSRPRRAADPARQGAPGGRRAGARARLHAAARRRARGCPGLAAVAGGAHAAAGARRVLRGAPEPLRVRVALSHAPARLLAGAARAGRGRRRRGGRAPARGGGGAAPLVEGPAVSGRPGISVVLITRNEATRIRTCLDSVRWAEEIVVVDQHSGDGTAAICREYGARVIAREMRAGFGEQKNFALAQATQPWVLSLDADEEVTEPLRREIEAAVAAPAGCVGFSMPRLTSYLGRFIRHCGWYPGAVLRLFERGCGRFTDALVHEGVEVDGPVGELRSDLLHRSYDSLADHVRKLLLYTAYDARMLQQRGEPVSGLAGAWRLAVKPPAVFVRKYVLQRGFRDGWHGFVLSAMSALVVLVNHVRLAELTGRLPVTPPPTPWLEPEPPTVLLMANFADLVGGGEESLLALAARLDRHRVRPIATVPAEGEMADRLRALGVPVTVLPLPRLRPWSAAAIGFTLKRLNRLLVAERVALVHAHGGRGAVYAGLVGRNTGTPLVWHARIADPDRWLDPLLVRLAHTIIANSGATACRFRRWPRARVTVVPNGVDLGRFTPRPADPELRRTLGLPATGPVVGYVGRLERGKGPDVLLAAAELLALKVPSVTLLVVGDGPLRLPLAARAASAGVRAVFTGQRGDIPALLRLCDSVAVPSRQEAFGRIIIEAMAARVPVVASAVGGIPEVCADRFTGLLVPPEDPDALAAALAATLTDATASTSRVRAAAADVATRFDIRVHAARVHAVYDGVLQETRR

SEQ ID NO: 8194 - protein, 398 aa, Arthrobacter sp.
MTMPDAQRPLTILIAADTYPPHVNGAAQFGYRLAKGMTGRGHDVHVLACRPDKGKSFTEFRAEGTVHRIRSHSVPTHEYFRITFPWEIKKEISLLFDRVKPDVVHIQSHYMIGEHVLYEAEKRGIRIVATNHFMPENLNPFLPFPQWFKDIIGKISWKDMGKVMGKADVVTTPTPLAAKAMHQHAFLRKVLPLSNGIDSAAYEPRPDEVIEPHAYPTVLFAGRLAEEKHVDVLIRAVAASPADLNVHLEIVGGGEVRPALESLVERLGLRDRVKFLGMASDEDLRQAYIKADIFCMPGTAELQSLVTLEAMSASTPVLLADAMALPHLVRDGENGYLFTPNDSADLAAKLTRILRLPAEERKAMGHASRCMVEPHSIQGTLQTFEDLYRGASYDDKVV

SEQ ID NO: 8195 - protein, 390 aa, Nesterenkonia jeotgali
MRILIAADTYPPDVNGAAVFSHRLAKSMAARGHEVHIAAARTSRGPDMVEHTDEATVHRFRSFKAPTHEYIRLCLPWLVEPAMGRLMDELQPDVVHVQCHYMIGKAAIDAAAERGVRTIATNHFMPENLDPFLPFPDWFRRIVAKNSWRDMGKLMGKAAVVTTPTPLAARTMMQRAGFEKVLPLSNGIDVDYYRLGPEDVLTPPARPTVLFVGRLAVEKNVDVLIEAIAKTDPALGIGLDIVGDGEQRAGLAAQIQQLGLGDRVRMRGHVGEDALRRAYLEADVFCQPGTAELQSLVSLEAMSAGTPVVLADALALPHLVEEGVNGYLFEPGNSAHLAARLEQLFTLSPEQRTRMGERSQERAGRHSLKTTMDAFEKLYRGADWIEGRTP

SEQ ID NO: 8196 - protein, 389 aa, Pseudonocardia asaccharolytica
MPPLRIVIGADTYPPDVNGAARFAERLATGLAGRGHDVHVVAPSPDGPAGRDRRDGLTVHRIRSYRYPLHENFRICLPWQAGPATATVLDDLDPDVVHVQAHFVVGRGLAVAASGAGRPLVATNHFMPENLFAHARVPGSLRQAAARWAWRDLARVFGRAAVVSAPTPRAVQLLAESAGIAGALPVSCGIDADRYAGGVEADVPTVLFVGRLDQEKRVDELLRAFALLPAGLPARLEIVGDGARRGAWTALAEELGPAERVRFAGFVSEEELLAAYRRCAVFCMPGVAELQSLATLEAMSASKPVVAADAMALPHLVRPGRNGWLYQPGDVEALSARLATLLADAPLRRRMGAVSRQIAGSHALGKTLDRFEDLYRRVLGHTTDRIAAA

SEQ ID NO: 8197 - protein, 368 aa, Unknown
  Description of Unknown: unclassified Haloferax sequence
MQSVAAFTDTYLPTVNGVTYTIQTWRERWHRRGGRMDVVFPADDDYDPEPGEYGVRSLPFPFYEGIRIGAPRIPGAVDDVDVVHAHTPFGLGLAGLRLARRRDLPLVASYHTPTGEYAEYLSSVGAIERGVERTAERYERWFFDRADAVIVPSEDAERRLVDEVGVEAEIVVLSNGIDAERFEPVEGGDFRRRYDLGDGPLIGYTGRHGYEKRLDELVRAAADLDATLVFGGDGPAREELVALADDLGADAHFLGFLDREELPAFYSALDVFCFPSPVETQGLVALEANACGTPVVGVNEGALEDTVLDGVTGYHYESGDLEGFRRGIRRALAEREALSARCLDRRDEVSVDRSVDRLAALYDRLASK

SEQ ID NO: 8198 - protein, 368 aa, Halorientalis persicus
MGRTVAVFTDTYLPTVNGVTYTVQTWRQRWAERGGRMPIVYPGADDYEPADDEFPVRSFEFPFYDEFNAAMPRVPDDITAAEPDLVHTHTPFLLGLSGLKFARSNGIPLVASYHTPTAEYADYIAEGWLRSPVERAARTYEKWYLNRAEMVVVPSEPARHHLREIGVRTAVEVVPNGVDTDRFGPVDTSRFVEAHDLDTGKPLVGYTGRHGFEKQLDLIVEATDGMDVTVVFGGDGPARDRLQRLAADADVDARFLGFLDREDLPAFYSALDVFAFPSPVETQGLVALEANACGTPVAAVDAGALSDTVVTGETGYRAPPGDAEGFRAAIERTLAERDALSEHCLDRRDAISVDHAVDKLADVYEMLL

SEQ ID NO: 8199 - protein, 462 aa, Nesterenkonia sp.
MPSSAGCAQPASIPGAAAAGRSLGCVCLRAIRCCTRTKKAGHPQRRRPLSSRRTARSGREDAASVSDRPPLRILIAADTYPPDINGAAVFGHRLAKHMAARGHQVHIAAARTGPGPDTVEQRDEATVHRFRSFKAPTHEYYRLCLPWLVEPAMHRLVQTIQPDVVHVQCHYMIGKAAILAAEAARVRTVATNHFMPENLDPFLPFPQWFKRIVAKNSWKDMRRLMGKAAVVTTPTPLAAETMRVKGGFDHVLPLSNGIDVDYYSLRPGERIPKRDRPTVLFVGRLAVEKNVDVLLEAVAKTDPSLEITAEIVGDGEQRDALREQAAALGIQERVVFRGFLDEAPLREAYIAADVFCQPGTAELQSLVSLEAMSAANPVVLADALALPHLVAEGENGYLFEPFNSDQLAQQLNRVFRKTPQQRAAMGALSREKAGQHAIGKTMAAYEALYYGSDWVDTYQFEY

SEQ ID NO: 8200 - protein, 420 aa, Leifsonia sp.
MPDTSGQPSSTPAQPPVPAKKPLTVVIGADTFAPDVNGAARFAERLAAGLVSRGHDVHIVAPAASRKHGTWVEEHEGQKMTAHRLYSWRWYPHDWLRFAIPWRIKQNSARILDEVKPDVVHFQSHIVVGRGLSQEAQKRGIRIIGTNHFMPENMLEFTLLPRFIQDYAIGLAWKAARRTFGRAEAVTTPTAKAAQFLEKYTGLRNVHAISCGIDAHNYTPDFTPRTGNRILFVGRVTGEKQIDVLLKAVSLLPSDLDAQLEIVGGGDQLKNLQSLAEQLGIADRVTFTGYVTDEELRQAYTRATVFGMPSIAELQSIATMEAMASALPVVAANAMALPHLVHDGENGYLFEPGNAQHLADRLEHVLTLPQEELDVLKNASLRIVAAHDIQTTISTFESLYRGEPVADPVTESAPPVPSTD

SEQ ID NO: 8201 - protein, 456 aa, Halomonas sp.
MPQRRRPPLSASLSDQEVAALTQLANGNALHRQREADRQARQASALTLLHATASTAETQPGSMKILMISDVYFPRVNGVSTSIASFRGALERLGHSVTLICPDYPLGQVDEPGVMRIRSRRIPGDPEDRMMRYRDLLALTPQLADVAFDLIHVHTPFTAHYAGVALGRRLNIPVIATYHTLFEEYIHHYIRWLPRGWLRLAARRLSVHQCQQLDALVAPSRAMQDALSRYGVTTPTTVIATGLALESFCHSQGGQDDSDFRTHYNLPQEAQLLLYVGRAAFEKNIDFLIDMLPKVLAEHPTTRLIITGEGPAHDSLVQRAREIGVAESVLFLGYLNRSGPLQAAYRAADVFVFASRTETQGLVLLEAMALGTPVVSTAMMGTLDVLKEGEGCLIAEDNHDDFATKVNRLLNDEPLRQQLAGRAQTYAASWHEDAKSTELVGLYQQLAAEHLEKTVK

SEQ ID NO: 8202 - protein, 485 aa, Unknown
  Description of Unknown: Gemmatimonadetes bacterium sequence
TIAVSVAVANALRRRLHPRGRLRVVPNGIDLARVEAEPSQQDLAMAQAALGGDSGRPVVAVVARRKDQQILLRALPALARPVTVVFVGIGPDKVLAAAAAAVPERHRIVFVPFTEHPLAFYRLATVAALPSRIEGLSQSLLEAMSLGVPVIASAAGGNPDLISPGETGLLVPPLDPAAWTRALDRMLGDDEFRARVARAGRAHARQEFTMPRTAERTEIVYCEAIERRRLLAGERPGTTPLTVVIPTLNEASQIGDCVRGLAWAGEVIVVDASSKDGTAATAAAAGARVLDGMAPGIAAQRNTGIAAAKHEWVFALDADERIGPALAAELAQVVVAPQHEAYRVKRRNLFHGHVLRRGHWGRDWVVRLFRRGRRFGGASAHPGLEFPEREQGELANELDHTPYKDLGHHLDKLITYSRMSAADLAAQGHRATFSDVALRPAFRFWRDYILHGSIFDGRLGVIHAGMSAASVFLKYAFLWERQRRG

SEQ ID NO: 8203 - protein, 369 aa, Unknown
  Description of Unknown: Halobacteriaceae archaeon SHR37 sequence
MATTESVAAFTDLYFPTVNGVAYTVALWRERWPHCRGTMDIVYPEMDGYEPDDGEYALSSVSAPLYPRYRLGVPTIPRGLETPDIVHVHTPFTVGFAGIRFARKRDVPVVASYHTLLEDRVNQHLPGSLVDGFKRTCRTYERAFFERVDHVTAPTSFARRHLLEHVEADVDVTVVSNGIDTEFFRPLESETFRDRHDLPDGPLLGYTGRHGPEKSIGEAIDAVDGTDYALVIAGDGPAREDLEARAATADAEIRFLGFLEREELPAFYSALDAFVFPSRVETQGLVALEATACGTPVVAVDAGALTDSVIEGETGYRYAPDDLEGFRWAIRRTLAERDRLSDLCRRRRPMLSADHSLEQLARIYDGIRG

SEQ ID NO: 8204 - protein, 391 aa, Unknown
  Description of Unknown: Propionibacteriaceae bacterium NML 130396 sequence
MKILIGHDTYPPDVNGAARFTERLATGLVARGHEVHLIAPSHTGREFVEDRDGVVVHRLPSHRYPLVDQFMICMPWQAGPRIKRILDEVQPDVAHIQGHMLIGRLLSKQATERGLPLVATNHFMPENLVELVKIPHRARRAVSRLAWKDCANILGRAQVVTAPTPRAVELLAGSAGLPGGLAISCGIDPEPYLAASRAAKHDRHLRVLFVGRLDQEKRVNELIRAFARLPKDLDVRLEVVGDGSFADQWKALAGSEGVADRTTFLGFVSEEELLAAYGRCDVFCMPGVAELQSLVTLESMAAGKPVVAANAMALPHLVHPDENGFLYSPGDVDELATHLGRLLSDPDLRRRMGAASREIVHQHALNATLGRFEELYREVSGGQVVPLRKAA

SEQ ID NO: 8205 - protein, 421 aa, Unknown
  Description of Unknown: Brachybacterium phenoliresistens sequence
MSETHRPSSPTLKVLLTTDWWEPVVNGVVASVTTLRRELESLGCEVRVLTLAPGLRSRRRDGVYELGSVSAALVYDQARIGMLSNRGVLREILDWGPDVVHSQCEFSTHVWARRIARDLDVPLVHTYHTIYEDYTHYYSPSRTMGRKAVATFSRKLLHSTDAVIAPTAKVARLLEGYRVERPVHVVPTGLDLERFRPARTAAERSDAASLRESLGIAPQDTVLLSVCRLAKEKNLDEVLDHVAAVDRPDAVLVLVGDGPYRAELEERAARLGVSDRVRFVGVVDPEEVARWYRIGDVFVSASLSETQGLTFIEALACGLPLLCRRDESLEAVVLEGETGYCYEDSAGFERGLSAIADSSAQRERMAAAALEHARTTCGAEAFARSVLDVYSGVVARRADARYMGAALTAACLMGEDLGVSA

SEQ ID NO: 8206 - protein, 391 aa, Gryllotalpicola sp.
MGCDTFAPDVNGAARFAERLAAGLVERGHTVHVIAPSQTVFRTGHWDETHAGARLHMHRLFSLRWYPHPWLRYMMPWTIRRNTSRILDQIKPDAVHFQSHFVVGRGLSVTARSRGIRVVATNHTMPENMIEHTTLPKFMQPALLKWAWWDATKILKRADAVTTPTRRAADYLEEATGITGVHAIGNGVRVSDYTPDFEHRGSRIVFVGRITGEKRLEVLVHAVALLPKSLDWSLEIVGDGEQRHHLERLAAQLGVGERVTLAGLVSDAELKQAYTRADVLAMPSTAELQSIVTMEAMSSGLPVVAADAMALPHLVHDGENGFLFRPDDAQDLAAKLEKILTLPDEEFTRMKKASLRLIQAHDIERTLTTFECLYRGKPVVDPVTEEVTEGR

SEQ ID NO: 8207 - protein, 389 aa, Unknown
  Description of Unknown: Micrococcales bacterium 32- 70-13 sequence
MCVLIGADTFPPDVNGAARFARDHAVRLARRGHDVHVVAPAVSMRSRSGIEFYDGQAIHVHRLRSIRWPFHEWLRVTPPWEVRRQVRRIVNDVQPAVVHLQSFIDIGRGLAYEAQRAGVPLVATNHVMPDNVIEFSGLPRTLQPRLARFGWNLASTVYSLADVVTSPTPTAARYLEEQTDLRGVIPVSCGIDLDRFTPKQTRPRENRVLFVGRLDPEKNLTTLLTAFSLIRSDLNARLDIVGGGAERDRLVQTAVQLGITSRVTFHGYVTDHELVGLHHRATVFVMPSTAELQSIATLEALASGTPVVLANAMALPHLVANGEEGYLAQPGNAHEFADLIERILQLTDASYARMSRAALTTARSHDAGAITLRYEQLYRDAWLSPLPAA

SEQ ID NO: 8208 - protein, 660 aa, Amycolatopsis sp.
MTALAIVCALAAAVLFALAASRQHAEVTDLAVDGTPGLRSLARLLRSPGWWAGTGLATGGSLLHVVALSLAPLPVVQPLGVLSLVLTVLFGRRARNRRVVAAVVLVVAGVAGFVALAASAAPVTNINAETAEVVAVTGFAVAALAWFARAGCTALAAAAAVLFGLGASVVHAAASQAPAIAVLLGGQALLLLGAGGVILHRAYAAGPTAVVVGTTTVLDPLTAVAVAALAYGEVPQPAAALAAVVALAGVRVLAGAVPQVPPKSEENPVHPTGLRVLIGADTFPPNINGAAFFAERLARGLVGRGHDVHVVCPSDDGPARTERRDGYTIHRLRSRAIPFHSEYRFCTPGGARTAAGEILDRVRPNVVHVQAHFGVGRALLEAAAERDVPGMATNHFMPDNLLGYTPFPRWLKDAITRWAWKDLVRVYRDTRIVTTPTPRAAQVLAGIGLDRPAQVVSCGIDLAHYAAPARPADRPMSVLFVGRLDAEKNIDQLLRALAPLPHVRADLVGDGTRRHELEDLAAELGVTDRVTFHGFVSDAELVHRYAAADVFCMPGTAELQSLATMEAMAAGLPVIAADALALPHLVHHGENGYLFEPGAITTISRWIADLAADPETRARMGEASRAVIARHDIDGTLTTFETQYRTLLGLSTPVTVGQAA

SEQ ID NO: 8209 - protein, 400 aa, Herbiconiux solani
MGADTFTPDVNGSARFAEHLASGLAGRGHEVHVVVPSAKLPVGTRTEVFDGQEVIVHRLYSWRWYPHDWLTFALPWRIKQNSARIIDEVKPDVVHFQSHIIVGRGVSTEAEKRGIRIVGTNHVMPENMLAFTGIPKFLQNWAIGLAWAAARRSFIRADAVTAPTRRAADFFEEATGIGNVYAISCGINASSYTPDFEPRKENRVLFVGRVAGEKHIDVLLKAIALLPADLDTKVEIVGGGDQLKNLQAMAQQLGLGDRATFTGYVTEEELRKAYTRSTVFAMPSIAELQSIATMEAMASGLPVVAADAMALPHLVHDGENGFLFRPGEERDLADKLERVLRMPQDELARFKNESLAIVAAHDIDRTLTTFEHIYRGEPVTDPLVVPHAKVPDRGQGDSAA

SEQ ID NO: 8210 - protein, 429 aa, Microbulbifer mangrovi
MNIVMLTNTYLPHVGGVARSVQAFCNEYRKRGHQVLVVAPEFSEKIANEKDVVRVPAIQNFNGSDFSVALPLSGELTERLDFFEPDLVHSHHPFLLGMTALRIARSRELPLIFTHHTLYERYTHYVPADSEALKRFVIELATRYGNLASMVFAPSESVAELLHERGVKTPIQVVPTGVKLEDYQHGNGKKAREQYGIPENAFVVGHLGRLAEEKNLIFLSEAVIELMVRNDDLHFLVVGTGPIQDRIRALFEEHRLGHRLHLTGTLQGQPQSDAYNAMDVFGFASTSETQGMVLTEAMAAGVPVVALDASGCREVVEDRINGRLILKQSTREMIGGLQWVYDLPTGEYRELCQAARETAERFSMENCATAALNHYQSLVHQHWPLDDSLYAQWMRLRNMIGAQWEIIEGVTSAASAALDPEHSSKSHLQ

SEQ ID NO: 8211 - protein, 412 aa, Microtetraspora malaysiensis
MPTVNSPDTPDAGPASPAPMGRRVLIATDTYPPDVNGAAYFTHRLAAGLAERGNDVHVVCASEQGPPRIETAGDVTVHRLRSAPLLVHPTMRVGVPAGLGRTMSRLIQGLRPDVVHVQGHFVVGRAAVGAARRAGRPVVATNHFMPDNLFPFARVPARLRDVADRMAWRDVARVFSRADHVTTPTKIAAELLAAKGFTGVVEAVSCGIDLDRFRPRPWDRIRARERFGLPDLPTVLFVGRLDEEKRLDDLILALPQVLNHVEAQVVLAGTGGRRAALERLASRIGARERVRFLGFVPDADLPLAYAAADVFAMPGIAELQSIATLEAMASGLPVVAADAMALPHLVDGNGHLYPPGDVRAMARQLTAILTDSGLRAAMGRAGLALAASHDHRLSLARFEEIYAELTTRSVRA

SEQ ID NO: 8212 - protein, 669 aa, Prauserella shujinwangii
MLTLAIGLAAAGACCFAGTVHLQHRAVHQASAGREGRSLGLPAVQTILRNPGWYAGIGLAGLGAVLHVLALTMAPLAVVQPIGVLTLVLTVLLARTVLTRAVLAALVMSVAGVAGFVALAAMTTDAALPPPDLASAQWAVLGAAVLAVAARYTRDRARCLFLALATAVLFGFTSALVRAAAVAPLSGGMAVLVVAEALAAALAGVWLLHQAYASGPAAIVAGATTIVDPLSAVVIGVFAYGEMAPGQLAGMVVPGAVAVAGLALLAREVPAAPTGPARRKRRAGPLRIAITADTYPPHVNGAANFAYRLASGLAGRGHEVHVVCPSTGGETFTETAGGVTVHRIGSLRTPFHPTFRFCPPWRASKAVPALLAEIEPDVVHTQAHFLIGRSAVRAATAAGVPVVATNHFMPENLLGYGPLPRFTHRPLARLAWRDLARVFGRATVCTTPTPRAAELLERNGLNRPVMAISCGIDRAHYAGPPEPTSAPAVLFVGRLDAEKNVHELLEAAALLPDVCVELVGDGSERHRLAALATRLGIADRVRFHGFVPDEELVRAYRRCDVFCMPGTAELQSLVTMEAMAAGKPVVAANAMALPHLVRPGHNGWLYPPGDVPELARLLAAVLADEHTRTAMGKASLDLIAAHDLESTLDQFDRVYLDITARPMVSALQR

SEQ ID NO: 8213 - protein, 368 aa, Unknown
  Description of Unknown: Halobacteriales archaeon QS_8_69_26 sequence
MDYRVTAFTDTYLPTVNGVTYTLKCWRDRWNGNGGCMDVVFPRANGYDPGRGEHPVRSLPFPFYDGFRLGVPSVPKGARDADLVHAHTPFALGLSGLRLARKRDVPLVSSYHTPAGEYAGYLGPTPWAEDKIRGAAETYERLFFDRSDVLIVPSKAAMRHVKSQVGVAADVRVVSNGVDTDRFRPVDHGEFLVRHDLPTDRPIVGYTGRQGYEKRVRDLVDAAEGLDATVVLGGDGPAREDLEARAADVDGDVRFLGFLDREELPAFYSAMDVFAFPSPVETQGLVAMEANACGTPVVGADAGALADTVEEGVTGYRFPEGDVETVRERIRRALDERDRLSEHCLDRREAHSVERSLERLRGIYRELI

SEQ ID NO: 8214 - protein, 382 aa, Unknown
  Description of Unknown: Candidatus Rokubacteria bacterium sequence
MRIALYTNNYLPFCGGVTISVETLRRGLEAAGHEPWVFGPRLRGARDASPRVVRYPSIPATTYPEFALAVPYSRRIARLVAAIDFDVFHAHHPFLLGPAARRLARRARRPLVFTYHTRYEKYAHYVPLKRALVEAAAVRLSAAFAARADAVLAPSAIIRDELSARGVRAPISVVPTGVDLERFRPGDRAAARRELGIGDGEAVVLYVGRLDREKSVDRVLLAFERIASTVPAARLLLVGHGTQAEQLRRLASSLPVATRIGFLGVRPHHALVECYRAADVFLFASETETQGLVLAEAAACGLPAVAVDAPGCDEVVRDGETGLLTKGDPAALAEAAIGLLLDPERRRGMARRAREVAQRLFDVQLQIDRTMAVYQDVIARVR

SEQ ID NO: 8215 - protein, 401 aa, Sinomonas mesophila
MPAPEPETTQRPLTILVGADTYPPHVNGAAQFGYRLARGMTARGHSVHIVAGRSEKGRSYTETRPEAVVHRLRSHSVPTHEYFRIVFPWEVKKEIALLFDHVQPDVVHIQSHYMIGEHVLYEAVRRGIRVVATNHFMPENLNPFLPFPQWFKDIIGRISWKDMGKVMGQADVVTTPTPLAAKAMHEHAFLREVIPLSNGIDVAAYEQRPGEEIRRNPYPTVLFAGRLAEEKHVDVLIEAIAKTPVELDVHLEIVGGGEVRPALETLVDRLGLRQRVRFLGLAPDEELRSAYLRADLFCMPGTAELQSLVTLEAMSASTPVVLADAMALPHLVREGENGYLFRPNDAADLAEKITAVLGQPADERRRMGAESHRMVQKHGIKATLDTFESLYRGVEPAPEAL

SEQ ID NO: 8216 - protein, 399 aa, Unknown
  Description of Unknown: Microbacterium sp. 1294 sequence
MTPPDDPAPERGPLTIVIAADTFAPDVNGGARFTERLAAGLAARGHDVHVATPSVGHRNHGVFTEDIEGQPLTVHRLPGWRYRPHDWLRFVLPWMGKHYSRRLLDEVDADVVHSQSHIVIGRALTRIANQRGIPVVATNHIMADNILDFTLLPKFLYDIFLKIAWADAERTFKMSRAVTTPTRKAAEFLENTIDISGVVPISCGIRQSNYTPNLEPRENRRRVLFVGRLTTEKHVEVTLEAITKLPDLDIQFEIVGGGDQRKSLGQVTERLGLTDRVTFLGRVSEEELRAAYTRADVFVIASVAELQSIATMEAMASGLPVIAANAVALPHLVHDGENGYLFEPGNADELAEKIRTVLTADQAEYSRMQQASLHGVEIHDIERTLDTFEKLYRGEPLGG

SEQ ID NO: 8217 - protein, 384 aa, Kocuria sp.
MKILITAETYPPDVNGSAQFARRLAHGMLERGHEVHVAAPMPTHGPSRVMADDGVQEHRFRSHHAFTHPYFRLCFPWEIAREVSHLFDEVQPDVVHVQCHYILGRLVIHEAVRRGVRVVGTNHFIPENIEPFLPFPDWFIKGYRKVSWWDIARVYGRCDVITAPTPLAVRTMVDNGVADRAVAVSNGIDAGHYEAAADEDVRHPDHPVVLFCGRLAVEKNVNELIEAIALIPRAKNVHAEIVGEGEQRERLVRLAHERGVADRVQFLGFLTDEELRRAYLRADVFCQPGTAELQSLVTLEAMSASTPVVLANARALPHLAEEGRNGYLFTPGDPADLAAKLQLVLDASPEQQRAMGAHSRAMVSQHSFTRTLDTFERIYGGANR

SEQ ID NO: 8218 - protein, 371 aa, Unknown
  Description of Unknown: halophilic archaeon DL31 sequence
MESVAAFTDTYLPTVNGVTYTVKAWRDRWEARGGRMDVVYPGSDGHDPDPGEHPVRSLPLPLYSGFRVGTPTIPDGLVDPDIVHAHTPFSLGLAALRFAQKKAVPLVVTYHTPTAEYTTYFTDWGPLQDGLSAVSRQYERWFLNHADAVIVPSEATGQYLTEELDIDVPPTVVSNGVDVERFRPVDTMSFRERHNLPADKTLVGYTGRHGHEKCLPDILAACERLSGDVTVVFGGDGPAREELEAEARECNVDARFLGFLDRAELPAFYATLDAFLFPSPIETQGLVALEAFACGTPVVGVDSGALSDTVDDGVTGYHYQRGDIDGFTAAIERTLEECETLREACLEKRGEISVESSVDRLGALYAALSEQ

SEQ ID NO: 8219 - protein, 415 aa, Unknown
  Description of Unknown: Chloroflexi bacterium sequence
MHIAFFTNTYVPVMSGVVQSIRTFRNSLVEQGHNVFIFAQHAEGYKDTEPFVFRYPAISLPMQQKYPVIIPLSPRVDWLMPALKLDVIHSHHPFLLGQAAAAKAADLGVPLVFTYHTRYRAYSHYVPFNQKLVKTAIEDMLAEYMKKCHHIVVPSESIKQILSEVYGIREQMTAIPTGMDLSLWENADGPAVRRSRGWGQDTVLISVGRLAKEKNWPTLIRAAAQVIRHRAGVRLCLIGDGDERRKLEALAAELGVAERVEFTGNIPYRSVIAHLKAADLFCFASESETQGMVTMEAMAAGLPVVAVDATGTRDVVTHGHEGLLTPNHSNALAQAIETVLNDDSARARFAGAALARAQTLSIQAQAKKLVDVYRQAAQDQRAGRYVQITNPDLAAKRSARWLAVLENMFEPDKSG

SEQ ID NO: 8220 - protein, 393 aa, Agromyces sp.
MGADTFTPDVNGAARFAERLAAGLVERGHEVHVMAPAASRKHGTWKEVHEGQEMTAHRLYSWRWYPHDWLRFALPWRIKQNSAKILDRVQPDVVHFQSHIIVGRGLSVEAQKRGIRIVGTNHMMPENMLEFSLIPKAWQEWAVGLAWKAARRSFSRAESVTTPTRRAADFLERATGLRGVHAISCGIDAHKYAPNWEPRTENRIIFVGRVTHEKHIDVLLHAITLLPDELDVKVEIVGGGDQKRNLENLAAELGIADRVTFTGYVTDEELREAYHRASVLAMPSIAELQSIVTMEAMASALPVVAADAMALPHLVHDGENGYLFEPGSAEDLAAKLRLVLEAAPEEYRRMKEESLRLIAAHDIQRTITTFENLYRGKPVTDPVTDNAPAALSE

SEQ ID NO: 8221 - protein, 480 aa, Nostoc punctiforme
MNTLASLNLVKSLENSASETPNSQPVYALISVHGDPTAEIGKEGAGGQNVYVRELGLALAKRGCQVDMFTRREYPDQEEIVELAPGCRTIRLNAGPAKFITRNDLFEYLPEFVEAWLNFQQRTGRSYTLIHTNYWLSAWVGLELKSRLGLPQVHTYHSIGAVKYRNMENPPQISAIRNCVERAILEQADYVISTSPQEAEDLRQLISQHGRIKVIPCGINTEHFGSVSKEVARQQLGIASDSQIILYVGRFDPRKGVETLVRACANLPSAFQLYLVGGCREDGADFKEQQRIESLVNDLGLEAVTVFTGRISQALLPTYYAAGDICVVPSYYEPFGLVAIEAMAARTPVIASNVGGLQHTVVHGETGFLVPPRDSKALAIAIHSLLQNPTLKESYGNAAQNWVQSRFSTQGVAARVHELYQSLTLDTFIQEIIKTKKLTPDLERQIQNLLKSKVLKSNEIKALEKLIDSFSNDIVQWATS

SEQ ID NO: 8222 - protein, 418 aa, Nocardiopsis xinjiangensis
MLRAARPLRVLVATDTYPPDVNGAAYFTHRLAEGLAARGHLVHVLCPSAQGPPHVSVAGGVTEHRVRSARIPFQPTMRAALPLGSGGHVDRLLARFAPDVVHVQSHFTLSRTVLARAQATGIPTVLTNHFMPDNLYAHARVPRSLQSAAGSLAWHDMIRVAEQADHVTTPTPRASRLLREQGLSRQVEAVSCGIDLERFHPRASERSAARARLGVPDRDSIVFVGRLDEEKRIDELVRALALLTTDLDAQLVLAGTGQREGELSELARVLGVRERVRFLGFVPDESLPSVYVAGDVFAIAGVAELQSIATLEAMSTGLPVVAADAMALPHLVIEGRNGYLFPSGEVEVLADRLRAVLSSRAERGFLGAAGREMAAEHDHRRSLERFESLYAQLSGAVSASGTSGEVTRSDRYERIVQG

SEQ ID NO: 8223 - protein, 367 aa, Halogranum gelatinilyticum
MDAVAAFTDTYLPTVNGVTYTVKTWRDQWHARGGRMDVVYPGSDDYTPDDGEYPVRSLPFPFYEGFRLGMPRIPDEVEDVDVVHAHTPFALGLSGLRLARREDIPFVASYHTPTGEYASYITSVESVEDRIEGLSERYEQWFFDHADTVITPSTVTKDYLLNTLGVDTDVTVISNGVDTERFRPVDTDAFRDKYDLDGPLVGYTGRHGYEKCLGDIVDAVAEADVDATLVFGGDGPARESLERRAENRGVDARFLGFLPREELPAFYSVLDAFLFPSPVETQGIVALEANACGTPVVGVNSGALADTVEDGVTGYHFAPGDIDGFAAATRRTLAERETLSENCLASREKISVGHAVDELAAVYERVR

SEQ ID NO: 8224 - protein, 396 aa, Humibacter sp.
MGADTFSPDVNGSAKFAEHLASGLASRGHDVHVVVPAASRAHGTWTEEYDGQKVTAHRLFSLRWPFHDWLRFVMPWTIRKNSARIIDEVQPDVVHFQSHIVVGRGLAAEAQKRGIRIIGTNHVMPENLTAFMPIPQAAKDVVIKLAWKAARRSFSKAEAVTAPTRRAADFFERGTGMTNTYAISCGIRASDYSPDFGPREGNRILFVGRVAPEKQIDVLLKAVQMLPSDLDVHLDVVGGGDQLKNLQQLAETLGIADRVSFTGRVSDEELRASYTRSTVFAMPSIAELQSIATMEALASGLPVVAADAMALPHLVHDGENGYLFTPGDATDLAAKLERVLRLPEDELQAMKRESLDIVAAHDIDRTLATFERLYRGEKVSDPAVSRPSDEERSSAA

SEQ ID NO: 8225 - protein, 400 aa, Unknown
  Description of Unknown: Microbacterium luticocti sequence
MTPAASSADPQRRPLTVLIGADTFLPHVNGAARFAERLAAGLVARGHDVHVSAPSAGHRNHGTFVEEIEGQPMTIHRLPSWRWPPHDWLTFVLPWMSKHYARRVLDEVKPDVVHIQSHIVIGRGLAREARKRGIPIIATNHVMAENIVDFTTLPPLLDKVFIKLAWSDAERTLKMARAVTTPTRRAADFLESTIDISGIVPVSCGIDRTHYRADLTPRETNRVLFVGRLTTEKKIDVLLRAVAALDPALDVHVDIVGRGDQRRNLEGLAHELGLDARVTFHGHTSDDELRDLYTRASVFAIASIAELQSIATMEAMASGLPVVAADAVALPHLVHDGENGYLFPPGDVDALADRLTRVLTADPDERRRMQQASLDGVVIHDINRTLDTFEALYRGEPLPD

SEQ ID NO: 8226 - protein, 397 aa, Unknown
  Description of Unknown: Microbacterium testaceum sequence
MSPGPVPDERPLTVLIGADTFLPHVNGAARFAERLAAGLVARGHDVHVAAPSVGHGHSGTFTEVIEGEPMTMHRLPAYRFLPHDWLTFVLPWRAKHYARRVLDQVKPDVVHIQSHIVIGRGLTREARKRGIPVVATNHVMAENILDFTTLPDFLDRIFVKLAWADAARTFAMTRAVTTPTRRAADFLESTIGIQGVIPISCGIDRSNYTPDLEPRAANRILFVGRLTTEKGIDVVLRALAMLDPALDATFDIVGGGDQRRNLEQLAEQLGLGSRVTFHGHTSEDELRALYTRASVFAIASIAELQSIATMEAMASGLPVVAADAVALPHLVHDGENGYLFEPGNAEELAARLTDVLTAEPEERRRMQQASLDGVIVHDIGRTLDTFEALYRGQPIPE

SEQ ID NO: 8227 - protein, 435 aa, Murinocardiopsis flavida
MTGSAQRYLTSMSRAGRNGGTRRRILIATDTYPPDVNGAGYFTHRLATGLAERGNDVHVVCASAAGRPAIEYADGVVLHRLRSASVLVHPTMRTAVPLGVHGHVARLVDRFAPHVVHSQSHFTISRAAIRAGRLAGTPVVLTNHFMPDNLFAHAHLPGLLHSTAGTLAWRDMIRVAYEADYLTTPTERAAKLLAEKGYSRPVEPVSCGIDLERFQPRPEERSVARAGFGLPDRETMVFVGRLDVEKRIDELIRALPRVAERRDVQLALVGTGQRQEELRRLAHEHGVADRVFFLGFVPDEDLPQVYVAADMFAIGSVAELQSIATLEAMSTGLPVVAANALALPHLVKEGENGFLYPPGDIGALTRRLLEVLESPRRAEMGEASRRIAQTHDHRNSLERFEEIYDKVRSSRPGLARRGILTRVPAQSRRRQAMAA

SEQ ID NO: 8228 - protein, 398 aa, Promicromonospora thailandica
MLRILVAADTFAPDVNGAARFADRLSAGLAGRGHDVHVVAPSPTGSAGTEERDGVVVHRLVSRRMPGLDAMRVCLPWEVSSEVRRVFADVRPDVVHTNGHMLLGRAVVQQALREETPLVATNHLMPENIVGYLPLFGPLRAVFAEWMYRDLGRVYSRADAVTAPTARAVELINRRAGLTAAFPVSNGIDADAYERARVAVAARRSTPGGPDTLYEPTVLFVGRLDQEKRVDELIRAFARIAPDVPGRLQVVGDGACRGAWEALADRLGVAGRVTFLGRVSDDDLMSAYATADVFCMPGVSELQSIVTMEAMAVGLPVVAADAMALPHLVRPGTNGELFTPGDVDGLAGHLRTLLTDVALRERYGTAGRELIEAHTLGATLGIFEALYEKVMSGAPVAA

SEQ ID NO: 8229 - protein, 417 aa, Kocuria polaris
MSADTTTADRPLTVLLGAETYPPDVNGAAQFGHRLARGLHERGHRVHVLCARPEPGPSCRAEDDGVLEHRLRSHRAFTHPYFRLCFPWQVAGEIRRVLDEVRPDVVHVQNHYIIGRMLVREARRRGIRTVATNHFVPENLEPFLPFPAWVLDRYRAVSWRDMVRVFGACDVVTAPTPLAVETMRRNGFPGTVLAVSNGIRIADYEAHDGEQRERGAPPTVLFTGRLAVEKNVDVLIEALSLLPAELDAHLELVGDGEQRSALEKLARALGVAQRVRFLGYVPDEELRAAYLRADVFCQPGTAELQSLVTLEAMAASRPVVLANARALPHLAEDGVNGWLFAPGDAQDLARKLALVLGAPPEERARMGRESRRKVAQHSFPRTLETFLRLYRGQHPEPVRARAAGPGRLRSRLASLVR

SEQ ID NO: 8230 - protein, 382 aa, Unknown
  Description of Unknown: Candidatus Rokubacteria bacterium sequence
MRIALFTNNYLPFCGGVTISVETLRRGLESSGHEAWVFGPRLNGPKDVSDRVVRYPSIPVATYPEFALAVPYSRRIDRLVTALDFDVIHAHHPFLLGPAARRLARRNRRPLVFTYHTRYEKYAHYVPLPLRLVQAAALRISAGFAAQADAVLAPSALIRDELHARGVRTPIAVVPTGVDLQRFRPGDRAAARRSLGVRAADPVVLYVGRLDREKSVDRVLLAFERVASTLPAAQLVLVGQGTETQRLRRMADALPVAGRIRFLGLRPHHALAEHYQAADVFLFASETETQGLVLAEAAACGLPAVAVDAPGCDEVVRDGDTGILTKGDPAALAEAVIGLLLDPERRRAMARRAREMAERLFDVTLQIDRTMAVYADAVARLR

SEQ ID NO: 8231 - protein, 391 aa, Amycolatopsis circi
MPHSRLRIVIGADTFPPDVNGAAHFAERLARGLSARGHEVHILTPQRAEVPEPAAGYTLHYVPSHRTPFHPTFRFSTPRRARRTAAELLDELRPDVVHVQSHFSVGRGLLTAAEERGIPAVATNHFMPENLLGFVSLPEPVTSALTRWAWRDFVRVFRRAGVVTTPTPRAAQLLEEKGFPGPVAVVSCGIDLGHYAPVEPAPANPVRVLFVGRLDAEKNVDDLLRALSKVPSLHATLIGDGSCRTELEHLAARLDVADRVTFRGFVPDAELVRAYRTSHLFCMPGTAELQSLATMEAMAAGLPVLAADAMALPHLVAPGRTGWLYPPGETETLGERLLELTGDPALRARMGRAGQEAVARHGIARTLDAYEGLYQAATGALLHTPVTGQAA

SEQ ID NO: 8232 - protein, 388 aa, Chthonomonas calidirosea
MRIALFSECYTPVLNGVVIAIQTLRETLRSMGHEVFIFAAGDPQPDDEQVYRLPALPFPKHPYRFARPFPTLPLDFSQLQIDIVHCQHPFPVGRLGARLARKNGIPLVYTVHSLYDTMLLLAKPALVRRLGPPTMRNVMRRFCNQADVVIAPSHYVAQALARCGIAVPIQVVPSGVIPPHVTPGDRESVRCQIGISEEVPVLLYVGRLAPEKRVDLLLEAVALLEQRSLKGPQGAFRLLLVGDGPCRAQLEWQVQRLGIQGRVVFVGAQPHAKIGAWYAASDIFLMPSPMETQGLVVIEAMNCGLPCIAVSEGGAGEAVIPEQTGILCPFSASAFATAIEMLLTNPYRRKQMGQNAYRHAEIYAPARTAQNILAAYTQAQAKHKREPI

SEQ ID NO: 8233 - protein, 393 aa, Arthrobacter sp.
MTEEPADKPLTILIACDTYPPHLNGAAQFGFRLAQGMHGRGHNVHVLAPSPESGPSHSETDGLWTVHRLRSHGVPTHEYWRICLPWEIKKHISMLLDRVQPDVVHIQCHYMVGEYTLYEARKRGIRVVATNHFMPENLDPFLPFPKWFKRIVARNSWRDMGKVMGQAAVVTTPTPLAAKAMVEYARLPDVMPLSNGIDASTYEPRPGESIDRPDHPTVLFVGRLAEEKHVDVLIDAVAKTPPELNVHAEIVGGGEVKSALIAQAKRLGIEDRVAFRGLVSDEELRQAYLRADIFCMPGTAELQSLVTLEAMSASTPVLLADAMALPHLVEQGENGYLFEPGNSTEVSKRITEILELSEDERAKMGRHSRAMVDSHSLESTLATFEKLYRAEGI

SEQ ID NO: 8234 - protein, 393 aa, Unknown
  Description of Unknown: Cryobacterium arcticum sequence
MAADTFAPDVNGAARFAERLAAGLVARGHVVQIMAPAATRKHGTWTEVHEGQSMTVHRLHSWRWRPHDWLRFALPWIVRRQSRMILDSFQPDVVHFQSHIVIGRGVAIEAQKRGIRIIGTNHFMPENLLQFSLVPKGFQDHVVKALWKAAEHTLKRAEAVTTPTRRAAEFLEKYTGLSGVRSISCGIDADNYSPNFEPRTENRVLFVGRVTGEKQIDVLVQAIALLDPSLNVQVEIVGGGDQRRNLELLVESLGLADRFTFTGYVTDEELRSAYSRATVLAMPSIAELQSIVTMEAMASGLPVVAANAMALPHLVHDGQNGYLFEPGNAQDLADKLTVVLTSSPEELDALKRESLKLIEAHDIKRTLNTFEMLYRGEPVTDPLVTDTAAQSRD

SEQ ID NO: 8235 - protein, 710 aa, Synechococcus sp.
MGRGVRVLHLHLYGLFRSRDLELGRDADTGGQTLYVLDLVRSLAQRPEVDRVDVVTRLVQDRRVAADYERPLEVIAPGARILRFPFGPKRYLRKEQLWPHLEDLADQLVHHLTQPGHEVDWIHAHYADAGFVGALVSQRLGLPLVFTGHSLGREKQRRLLAGGGDRQQIEQAYAMSRRIEAEEQALTQADLVITSTQQEADLQYARYSQFRRDRVQVIPPGVDAGRFHPVSSAAEGDALDQLLSPFLRDPSKPPLLAISRAVRRKNIPALLEAFGSSSVLRDRHNLVLVLGCREDPRQMEKQQRDVFQQVFDLVDRYDLYGSVAYPKQHRRSQVPAFYRWAVQRGGLFVNPALTEPFGLTLLEAAACGLPMVATDDGGPRDIQARCENGLLVDVIDAGALQEALERAGKDASRWRRWSDNGVEAVSRHFSWDAHVCRYLGLMQAHLHQLPSVGPRPQGSPASSHRPDHLLLLDLDSTLDCPDGPSLTALRSQLERDGQRYGLGILTGRSLAAARQRYGDLHLPSPLVWISRAGSEIHLGEDLQPDHIWAQHIDTDWQRESVEAVMEDLHDLLELQSEEHQGPWKLSYLQRQPDESVLSHVRQRLRREGLSARPQRRCHWYLDVLPRLASRSEAIRHLALHWQLPLERVMVMASQQGDGELLRGLPATVVPADHDPCLVRHPQQKRVLLSGRPSLAAVLDGLSHYRFPSQR

SEQ ID NO: 8236 - protein, 394 aa, Deinococcus sp.
MRALRIGLFTDTFLPDQNGIVTSVGLLSDELRARGHHVDVVAPFFPEQQDTRPDVRRVPSVRYVFLPTYRLAWPTRRAFEAKYDVIHTHTPLTLGLAGARLARKWNVPHVATYHTHVEAYTHYVPGMTLLQRQTRFVTRLMGLYYRRADAVITPTAGMLDVIREMGVRNSVVIPTSVDPAVLRAAPPIANPWPAGARRLLTVGRLAREKRFDLVLDTLARLPGAHLVILGEGPEREHLLQHAERLGVEERVSFLGVRPWTEIGAYYRLAELFLFASDTETQGLVLQEAQLMGVPVVAVGARGTLSGVAHGRSGYLVPPGDVAALTRYAQAILGDAALWKRLSLGARAFGTSWTPGGVAERVLDVYASVLGLPREVPFPLEAGGLSPRSTLAYDR

SEQ ID NO: 8237 - protein, 370 aa, Unknown
  Description of Unknown: Halobacteriales archaeon SW_7_68_16 sequence
MDPAVAAFTDTYLPTVNGVTYTVSCWRDRWHDRGGRMDVVYPDSDEYAPEDGEHPVGSLPFPFYDGFRVAAPSLPGDLDGVDLVHAHTPFSLGLAGLRLARRRDVPFVASYHTPTSEYAEYIAPRGLFDGAIERVISWYERVFFGRADLVVVPTEPVRNHLVGTVGVSTDVRVLSNGVDTERFTPASSAAVERFRERHDLPDGPLVGYTGRHGYEKRLPDLIEAAEGIDDVTVVFGGDGPERDRLRRRARAADVDVRLLGFLDREELSTFYTALDAFAFPSPVETQGLVALEANACGTPVVGVDAGALSHTIDDGETGYHYPPGDLVTFRDRIERALAERERLRETCLARRDRIGVAETVEKLGALYRTL

SEQ ID NO: 8238 - protein, 423 aa, Unknown
  Description of Unknown: Rhizobiales bacterium sequence
MKIAIFTNTYTPHIGGVARSVSGLVEELRATGHAVLVVAPEFAGRPEDEAGVIRVPAIQRFAGSDFSAPVPITLALVRALDAFDPDIVHTHHPFLLGDTALRISASRNLPVVFTYHTRYELYGHYVAQDAPALQRLVLSLALGYCELCDSIIAPSESMEVFLKEHRVAAPITVIPTGIEASRFDHGDGKRIRADLGIAADAFVVGHVGRLAQEKNLGYLADAVGLFLRDRGQSRFVVAGGGDMQGPMREAFARSGLTGRAHLLGPVEGERLSDVYAAMDVFAFSSRSETQGLVLAEAMTAGVPVVALDAPGAREVVVDGENGRLLPADASAGRFAEALEWVAGRPAAERASLGQTARKTAAAYSRPETVRRVLSLYESLLEGHLKAKSLDDSPWAAARRALAREWDILRNIANAVGDAAAGDE

SEQ ID NO: 8239 - protein, 390 aa, Ammonifex degensii
MRVGIFADSYLPYVSGVVRSIETFREELEKRGVIFFLFVPWYPGCQKEPNIYRFWALPAPTNPDFTLPLPFSPRLGSTLRSLKLDLIHVHGPFLMGSLGARWARRLNLPLVFTYHTLYEAYVHYFPFLRSWARTLTRRYTVGFCNRCDLVLAPSLAIKKYLEQNGVKAPVEVLPTGIKLSSFRGGDREAFRLNFNLSLEEKVLVYVGRLGEEKNLRFLLRSFALVKKELEATRLVLVGGGPQKEELEKLARSLGVGQEVIFTGPLPPDKVKDAYAAADLFVIASLTETQGLVVGEAKAAGLPVVGVEANGVKEMVRHGLDGFLTPPDEKAFAAAVIRLLSDEELYRKFKQEALKGAEELSSERQAERLLQLYRQLVAGRDKMHEKDGSKA

SEQ ID NO: 8240 - protein, 394 aa, Unknown
  Description of Unknown: unclassified Rathayibacter sequence
MGCDTFAPNVNGAAKFAERLAAGLAQRGHEVHVVAPSADGWSGTRVETHEGQRIVVHRLFSLRWYPHDWLRFAIPFRIRQNSARILDEVKPDVVHFQSHMIVGRGLSIAAEDRGIRIIGTNHFMPENLLEFTLLPTSVQAKAIQMAWRAASRTFGRAEAVTTPTRKAAQFLEKFTGLKDVQAISCGIDADNYTPDFTTRPGNSILFVGRVTGEKHIDVLLRAVSLLDPSLDAKLEIVGGGDQMRNLQQLATTLGIADRVRFTGYVDDAELKEAYTRASVFAMPSIAELQSIATMEAMASALPVVAADAMALPHLVHDGENGFLFAPGDAQALADRLTDVLTAAPDAFEAMKRASLRIVAAHDINRTISTFESLYRGEPVADPASDAASAPAGRS

SEQ ID NO: 8241 - protein, 432 aa, Haloquadratum walsbyi
MSIPTVVAFTDTYLPTVNGVSYTIQTWRDHWRDRGGTMQIVYPAAEQYDSTTGEFSIHSLPFPLYDGFRLGLPLLPDELDMANIDVVHTHTPFALGLSGVRLARRADVPLIASYHTPTGEYADYLTSRPRVERVVSAIANEYEHWFLSRADAVICPTYDARNRLRSSIDPDAKLTVISNGVDTDFFHPVDKSTTAAFCDKYNLPAGPLIGYTGRHGYEKNLSELLHAAAWIKHKQNGNSSTVESQTTASTEDNAQSTTAGEFDITLHSDDDSRHTQQELIDERNIDSLDVEPTVVFGGDGPAREDLEILADELGLDVHFLGFLSREELPVFYSALDVFMFPSPVETQGLVALEAIACGTPVVGVDAGALSSTIDDGITGRHYQPDNPAACGLKVIEVLTDHERFMNACLNHRSKLSVTRVVDDLLSLYRQMT

SEQ ID NO: 8242 - protein, 403 aa, Unknown
  Description of Unknown: Microbacterium sp. AG1240 sequence
MTSPATPDHVRPDPDRPLTILIGCDTFAPDINGAARFAERLAAGLVVRGHDVHVAAPNTEYRRAAPRTEVVEDQPMTLHRMPSVRWPPHDWLRFVWPWRSKHYARQVLDAVKPDVVHIQSHIVLGRGLAREARKRGIPIVATNHVMAENLLDFTALPAFLNRYILALAWADAKRTFDMTRAVTTPTRNAADFLESTIDLHGVIPISCGIDQANYTADLAPRDANRILFVGRLTTEKGIDVLLKAVAKLDPSLDVSVDLVGGGDQRKNLETLSDQLGIRSRVTFHGHASEADLRALYTRASVFAIASIAELQSIATMEAMASGLPVVAANAVALPHLVHDGENGFLFEPGNDDELAARLTDVLTASPEERLRMQRASLDGVSVHDIGRTLDTFEALYRGEPIPS

SEQ ID NO: 8243 - protein, 946 aa, Unknown
  Description of Unknown: Candidatus Rokubacteria bacterium sequence
MAVPVSEPRESPTVSVLICTKDRRQDVARALASLRAAGVEREGVEIVVVEETARPAPMAGVRYVPLPPEGRGFAHVRNRAVDAAKGSVLVFVDDDCEVAPGWQCHRVRREHPGIPGRRPAVSRRRDRRRRADRVPLDVQLRLSPRGDRGGRRLLRARLARRRGQPGGRAGERALAVPLRARRRRLPRATPASRRDLPLVPAPGAGGGADPAGQGAAARRRHRARARLAVAADGRADGGAGLAAVAGVAHAAGAARRLLRRAAAPLPVRPPLSGPPGRLVADAARPARRRRRRRGGPAARGAGPAATVAEVGRVSGRPGVSVVLITRNEAARIRRCLESVRWADEIVVVDQHSTDGTPAICREYGARVVTRDMLAGFGDQKNFALAQATQPWILSLDADEEVTPALRREIETAVASPGEHAGFRMPRLTSYLGRFIRHCGWYPSPVLRLVRRGRGRFTEALVHEELLVNGPVGDLGADLLHRSYDLLADHVRKLLLYAAYDARMLEQRGDRVGGLGALWRLAVKPPAVFVRKYVAQGGFREGWHGFVLSAMAALVVFVNYVRLAELTGWLPTPAEPGPAGEPPTVLLMANFADLVGGGEESLLALAARLDRHRIRPVASVPAEGDVAERLRALGVPVTVLPLPPVRPWRAAGMAWTLSRLRVLLAGERVALVHAQGGRGALYAALAARGRRTPVVWHARTADADRWLDPILARLAHTIIANSGATACRFRAWPAARVIVVPNGVDLGRFTPGVADPEVRRALGLPAAGPVVGYFGRLEHGKGPDVLLAAGERLQLKVPGVTLLVVGEGPLRAPLARRAAAAGVHAVFAGQRSDVPALLRLCDIVAVPSRQEAFGRILIEAMASRVPVVASAVGGVPEVCADGFTGLLVPPEDPDALAAALAVTLADTAAAAIRVQRAATDVSARFDIHTHAARIHTVYDRVLEDTGQ

SEQ ID NO: 8244 - protein, 550 aa, Cyprinus carpio
LSLSVPSKVMKAFFLLATLLWCLTTSFSWAAKIVVVPPIMFESHLYIFKTLASALHAEGHDTVFLISEGREVPPSNHYRLQRYPGIFNSTSADDFLQSKVHNIFSGRLTALELFDILDHYSQNCDAVVGSASVMEQLKREQFDLLLVDPNEMCGFVIAHILGVQYAVFSTGLWYPAEVGAPAPLSYVPEFNSLLTDRMSLFQRVANTAVYLVSRFGVRFLVLPKYDRIMRKYNIQPSVSMHDLVQNSRLWMLCTDMALEFPRPTLPHVVYVGGILTKPPSPLPQEFEAWVKDTDEHGFVVVSFGAGVKYLSDDIARKLAGALGRLPQRVIWRFSGVPPSNLGNNTKLVDWMPQNDLLGHTNTRAFLSHGGLNSIYEAMYHGVPVVGVPLFGDHYDTMTRVQAKGMGIMLEWKRMSEEDLYTAMVNIITDKRYRERAQLLSQIHKDQPGHPVSRAVYWISYILRHRGADHLRSAVYEIPTYQYFLLDVAVVIGVCLLLLGYLLYRIGKCIQSRMVRGSSPAEKVNGHCHNGIPNGKHKRNGHVRSTEKKLK

SEQ ID NO: 8245 - protein, 280 aa, Carlito syrichta
MGKAEMWLTQTYWDFEFPRPFLPNVDFVGGLHCKSAKVLPKEMEDFVQSSGENGIVVFSLGSMVSGLTEERANVIASTLAQLPQKVLWRFNGKKPHILGPNIRLYKCIPQNDLLGHPKTRAFLTHSGTSGIYEAIYHGSPVVGIPLFADQPDNIAHMVIKGVALRVDFNTMSSTDLLNALKTVINDPIYKENAVRLSRIHHDQPAKPLDRAVFWIEFVMRHKGAKHLWAAVHDLTWFQNHSLDVIGFLLACVATVIYTITKCCLFCFREFAKTRKKEKRE

SEQ ID NO: 8246 - protein, 492 aa, Chaetura pelagica
VWPADNSHWLNMEYILQELVVRGHKVTVLMPSCFLIFNHTQPSPFQFEVVEVPITKKEMDTLLQEFFGFFFYKDRDLSAWETVHKIAQLVYTMKNVIRIISDEVLKNEVLLERLRASAFDVLLADALSPSGELLAEKLGIPFVYTIRFSLGNTLERLCGALPAPPSYVPATLTGLTDRMSFLERLKNIFAYTIQDIIYHTMIWGSWDQYYSDVLGRPTTLCETMGKAEIWLIRTYWDFEFPRPFLPNFEFVGGLHCKPAKPLPKEMEEFVQSSGKHGIVVFSLGSMIYNLTDEKSNVIAKALSQLPQKVLWRYKGKKPETLGSNTRIYDWIPQNDLLGHPLTKAFITHGGTNGIYEAIYHGVPMVGIPLFADQHDNIAHMRAKGAAVELDFSTLKTQDLVDALNTVINNSTYKENALRLSKIHHDQPVKPLDRAVFWIEFVMRHKGAKHLRPAAHNLTWYQYHCLDVLAFLFTCTAITIFILVKCCLFFCRC

SEQ ID NO: 8247 - protein, 530 aa, Otolemur garnettii
MAVKWTSAFLLLQLSCCFSSGTCGKVLVWPTEYSHWINIKTILDELVQRGHEVTVLASSASILVDPSKTSAIKFEVYPTSLTKDDFEGFLFKMFNEWTYDIPKDSFWSYFSQVEKLTWKYSDCIQKLCDDVVFNTKLIKKLHDAKFDVVLADAISPCGELLAEILKTPLVFSLRFSPGYSFEKHSGGLPFPPSYVPVILSELSDRMTFMERVKNMIYMLYFDFWFQTFNMKKWDQFYSDVLGRPTTLYEMMGKAEMWLIRTYWDFEFPRPLLPNVEFVGGLHCKPAKPLPKEIEDFIQSSGENGVVVFSLGSMVSNMKEERANVIAAALAQIPQKVLWRFDGKKPDTLGPNTRLYKWLPQNDLLGHPKTKAFVTHGGTNGMYEAIYHGVPMLGIPLFADQPDNMAHMRAKGAAVTLDFTTMSSADLLSALKMVINDPIYKENAVRLSKIHHDQPMKPLDRAVFWIEFVMRHGGAKHLRVAAHDLSWAQYHSLDVIGFLLACRAAVMFVLTKCCLLCYRKFAAQRKKGKQE

SEQ ID NO: 8248 - protein, 528 aa, Anopheles sinensis
MASGAVVKCFLVLIGCLSASTLAANILYINTVASPSHFGWNRALMYALAGEGHNLTVFGVDSDKKPPPNVTFILIEDVYKKLYSDEEVETDFFEINKMGPFKMLKMYNEYMLGTCKIVLESGGAKQLLEYPADFGFDLIVHDYLSAPCLTALAHHRFGKPPLVAVTAYHAPSTTAYMSGAFQYSALVPNHVYDAMEEMTYCQRFTNFLLNVWEELLQTYDMIPQSNQLLRQYDPTLPDVAEFNRETKVVLLNANPIIQFTEPMMPNVIPVGGLQIIKPKPLPEDLAKILEQAPPGGVVVFSLGTNVRSDTLGVARITAILDAMEALPEYHFIWKFESDSMPRALPPNVHLRKWLPQNDLLAQPKVRLFITHSGLLSTQEAIWHGVPMIGFPVFADQFKNINYCMAKGVGKRLSIEHINTKELVDTIKEVMTKESYRTNMKRMSELFRDQPEHPLDRAVWWIDWVLRHPDSTELLTHGTRLHWFVKYSYDVLVPLLAAIAIVCHFVIFTVRRVFFSRKTTSKGEKQKRS

SEQ ID NO: 8249 - protein, 413 aa, Orycteropus afer
MSAKWISVLLLIQLSCYFDSVTCGKVLVWPTEYSHWINIKTILDELIQRGHEVTVLTSSASILIDPNKSSDIKFEVYPTSLTTPDLEILFMKWIKKMTYNMPKDNFWFQIFNMKKWDQFYSDVLGRDTTLIETMGKAEIWLIRTYWDFEFPRPFLPHFEFVGGLHCKPANPLPKEFEEFVQSSGKHGVVVFTLGSMVRNVTEERANTIASALAQVPQKVLWRFDGKKPDNLGPNTRLYKWLPQNDLLGHPKTKAFITHGGTNGIYEAIYHGIPMVGIPLFADQPDNIAHMKAKGAAVSLDIKTMTSADLLNALNSVINESSYKENAMKLSAIHHDQPVKPLDRAVFWVEFVMRNKGAKHLRPASLSLTWAQYHSLDVLGFLLACVAIVTFLVIKCCSFGYQKFFKTEKKEKKD

SEQ ID NO: 8250 - protein, 445 aa, Erinaceus europaeus
MPMKGISVLLLLQVACYFSSGKCGKVLVWPTEYSHWMNIKTILDELAQRGHEVTVLTSSASILIDPNKKSAIKFETYPTSVSKDEFNNVIMEVIHTWIYKMPKDAFWSHFSILQEQLWKFHVVVYKLCREAVLNKNLMMKLQESKFDLVLSDPVSPCRPTTLHETMKKAEMWLIRTYWDFEFPRPFLPNFEFIGGLHCKPAKSLPKEMEQFVQSSGENGIVVFTLGSMVRNMSEETANMIASGLAQIPQKVLWRFEGKKPDTLGKNTRLYKWLPQNDLLGHPKTKAFITHGGTNGIYEAIYHGVPMVGIPLFADQPDNIAHMKAKGAAVGLNLDTMSSKDLLSALKTVINDPSYKENAMKLSRIQHDQPVKPLDRAVFWIEFVMRHKGAKHLRPAAHDLTWVQYHSLDVIGFLLACVAATVYIITAGCLFCFRKCTKSGKREKRD

SEQ ID NO: 8251 - protein, 490 aa, Drosophila grimshawi
MMTNAIIRELVQRGHEVTFITPFTLANENLGSNYTEVLIPQYNFWPTVLETTKINTVVELTNVPTLKLLKLFYIMGLESTNFAFEQQEVLKLIHAKDKDDKYDLLLVEQFFNEGALFLGHLYQIPVIDIFTFTFANYMSSLVGVVTPWSYVAHGWKPYTDRMSLLERIDNVYCSLTEELMRQFWYYPAQDELLNRHFSKHFDKLPTIKQLERNISVILLNTYMPLEAPRPLSFNMIPVGGLHIKPAQPLPTEMQKFLDEAEHGAVYFSLGSQVKSSEFPPEKLKIFLDVFRSLKQRILWKFEDDKLPNKPANVMVQKWMPQSDILAHPNVKVFISHGGLFGTQEAVYHGVPVLGMPVYADQYLNINKGKVAGYALGVDYRTVTEEELRYSLTELLENPKYRDTMRRTSRIFRDRPLSAMDTAMFWIDYVIEHRGAPHMVSEGINLPWYKFYLLDIIGIALVIIIMPILGLLLICRRFQNAKKSKTKSKRN

SEQ ID NO: 8252 - protein, 528 aa, Carlito syrichta
MMLNNILLLSLQISLLGTVFGENVLIWPMEGSHWLNVKIIIDELIKKEHNVTVLVASGALFITPTANPSLIVEVYTVPFGKERVEGVIKDFVLTWLENRPSPSTIWRFYHEIAKVTKEFHKVSMEICDGVLKNQKLMEKLKKSNFSLLLSDPVFPCGDIIALKLGIPFMYTLRFSPASTVEKHCGKVPYPPSYVPAVLSELTDQMSFADRIRNFISYRLQDYMFETLWNSWDSYYSKALGRPTTLCEIMGKAEIWLIRTYWDFEFPRPYLPNFEFVGGLHCKPAQPLPKEMEEFVQSSGDNGVVVFSLGSMVKNLTEEKANLIALALAQIPQKVIWRYKGKKPVTLGNNTRLYDWIPQNDLLGHPKTKAFITHGGTNGIYEAIYHGVPMVGVPMFADQPDNIVHMKAKGAAVDVNMNTMTSADLLSALRTVIYEPSYKENAIRLSRIHHDQPVKPLDRAVFWIEFVMRHKGAKHLRVAAHDLTWFQYHSLDVIGFLLACVATMIFVITKCCLFSCQKFGKTRKKRKRE

SEQ ID NO: 8253 - protein, 529 aa, Aotus nancymaae
MSVKWTSVLLLIQLSFYFGSGHCGNVLVWAPDFSHWMNMKTILNELVQRGHEVTVLAKPASILVDPNNPSTLKLEVFPTSLTKTELDNIIIQQVKRWSDLPKDNFWSYFSQVQEMAWIFSDIYRNVCKDLVSNKKLMKKLQESRFDVIFADAIFPGGELLAGLLNIPFVYSLSFSIGYTLEKHGGGFLFPPSYVPVVISELSDRMTFMERVKNMIYMLYFDFWFQLFDMKKWDQFYSEVLGRPTTLFETMGKAEMWLFRNYWDFEFPRPILPNVDFVGGLHCKPAKPLPKEMEDFVQSSGENGIVVFSLGSMVSNITEERANVIASALAQIPQKVLWRFAGKKPNTLGSNTRLYKWLPQNDLLGHPKTKAFITHGGANGIYEAIYHGIPMVGIPLFAEQPDNIAHMKAKGAAVGVDFNTMSSTDLLNALKTVINDPFYKQNTMKLSRIHHDQPMKPLDRAVFWIEFVMRHKGAKHLRVAAHDLTWFQYHSLDVIGFLLTCVAAVIFIITKCCLFCFRKFVKTGNKEKKS

SEQ ID NO: 8254 - protein, 528 aa, Equus asinus
MSLKWIPLLLLLQVSCYFSPGSAGKVLVWPTEYSHWINMKTILDELVQRGHEVTVLTASASILVDPNKPSAIKFEIYPASLTKHDYEVIFKTLVDTWTRLPKDSFWTHFTLMQEIIWQFSDNVLKLCNDAVLNKKLIGKLQESKFDLIFADAVGLCSELLAELLQIPLVYSLRFSPGHTIEKYGGGLPFPPSYVPVVMSELSDQMTFMERVKNMIYVIYFDFWFQTFNEKKWDQFYSEVLGRATKLYELMRKAEMWLVRTYWDFEFPRPFLPHFQFIGGYHCKPAKSLPKEMEEFAQSSGENGIVVFTLGSMVSNMTEERANVIASAFAQIPQKVIWRYDGKKPDTLGPNTRLYKWIPQNDLLGHPKTKAFITHGGANGIYEAIYHGIPVVGIPLFADQPDNVAHMKTKGAAVRLDFDTMTSSDLLNALKTVIHDPSYKDNAMKLSRIQHDQPMKPLDRAVFWIEFVMRHKGAKHLRPASHDLTWFQYHSLDVIGFLLACVATTVFVIIKCLLCCWKFAKTGKKEKRE

SEQ ID NO: 8255 - protein, 509 aa, Tribolium castaneum
MWSKVILFVFFVNYGNSANILGLYFHAGKSHHILGEMLLKELARRGHNVTMASPFPLKEPFPNYTDIHLTGILEDQIARESMFMKMNKGHALVGVNDVLELTRAQTELTLNHTEMAKLLKSGTKFDVIIIDWFMNGAILMYGKLFNAPIIPIASHGTTHLANYIVGNPAPPSYIPNAMLPFPPNMTFFQRMVNGLVTIAYNVVGHTNAKYHQALLEKYFENAPSLDELKDTVALVLSNGHYSFESPRPFVPNVIPVGGFHVQKARKLPTDLQKYMDEAKHGVVYFSLGSNMKSVLLPKEKQQQILKAFAKIPHKVLWKWEDDNLENKPDNVLIRKWFPQNDILGHPNLKLFITHGGLLSTIEALHHGVPVLGIPIFGDQKANIPNAVSSGYAVQLELADLDEATLTKALDEILTNPKYQENAKKRSQLLHDQPMSPMDTAVFWVEHVIRHKGAPHLRNLGSYLPWYQYLMLDVALFVVLFLLVVVGIVGFVIRKICGCCCQRKSKEKRE

SEQ ID NO: 8256 - protein, 530 aa, Ochotona princeps
MSMKCASVLLLLQLNCCIHSVSCGKVLVWPMEYSHWLNLRTILNELIQRGHEITVLTSSPYIFFDPSKELGMKFANFPTSFTKEEIDDFFKYWINVLLNDMSRYKYWDYFPRWQKFFLKHSAIFDKLCKELVLNKEVMKNLLASRFDVIVADAVVPCGELLAELLEIPLVYSLRFTPGYKYEKYCAGLHFPPSYVPVIMSTLSGNMTFMERVKNILWMLYFDFWFQTFNDRALDKFYSEVLGRPVTFTELVGKADLWLIRSYWDLEFPRPLLPNVKFVGGLHCKPAKPLPKEMEDFVQSSGEHGVVVFSLGSIVTDMTEERTNVMAAALAQLPQKVLWRFEGKKPASLGTNTRIYKWLPQNDLLGHPKTKAFVTHGGANGIYEAIHHGIPMVGLPLFGEQPDNVAHMTAKGAALTLNWRTMSSTELFNALRTVINDPFYKENVMKLSRIHHDQPMKPLDRAVFWIEYVMRHKGAKHLRVAAHDLTWYQYYSLDVIGFLLACVTIIIYLVIKLCLFAFQKVVNTGKKTKRD

SEQ ID NO: 8257 - protein, 529 aa, Dipodomys ordii
MSLKWMSLLLLIQVMYCFNAGSCGKVVVLPMEYSHWLNVKIILDELVQRGHEVTVLTSSASILVNSGKSSPFKFEIFPTSLTTEEFASLFKRCVNVWTYEFPKYSVWKFYSRMQSMFEEYSDVFEIFCKYMVFNEELMKRLQESKFDALLTDPVVPCGELLAELLKIPLVYTLRFFPGNEYEKQCGGLPFPPSYVPVALSELSDRMSFMERVKNMMNVIFFDLYFQTFNEKKWNQFYSEVLGRPTTILELMAKADIWLIRTYWDLDFPRPLLPNFEFVGGLHCKPAKPLPEEMEKFVQSSGDQGVVVFSLGSMVSNLTEERANTIASALAQIPQKVLWRYEDTTPKTLGSNTRLYKWIPQNDLLGHPKTKAFITHGGTNGVYEAIYHGVPMVGIPLFVDQPDNIARMKAKGAAVRLDFTRFSSEDLLNALKTVIYNPSYKENAMRLSRIQHDQPVKPLDRAVFWVEFVMRHKGAKHLRPAVHDLNWFQYHALDVIGFLLACVAALIFIFTKCCLFCCRKFPKSGKKKRE

SEQ ID NO: 8258 - protein, 446 aa, Fukomys damarensis
MSMAWISALLLLQLSCYFNSGSCGKVLVWPMEYSHWMSMKNIIEELIQRGHEVTVLRPSSFIFVDVNSSSGIKFETFPSSVSREQLEEFYSQLLTKLINIGSIDSCLFCFLNSDDFSKAFSDNVHFFCKEAVSNKKLMTKLHESRFDVLLADPIAPCGKRTTLYETMAKAEMWLIRSYWDLEFPRPSLPNFDFVGGLHCKPAKPLPKEMEDFVQSSGEHGVVVFSLGSMISSMTEERANAIASALAQIPQKVLWRFDGNKPDTLGPNTQLYKWLPQNDLLGHPKTRAFVTHGGANGVYEAIYHGIPMVGIPLFGEQYDNIANMVAKGAAVKVNFITITSTELLNALKTVLNSPFYKENAMWLSTIHHDQPMKPLDRAAFWIEFVMRHKGAKHLRPLAQNLTWYQYHSLDVIGFLLAGVVIITFLVIKCCLICSRNFVKMVKKQKRE

SEQ ID NO: 8259 - protein, 528 aa, Aedes aegypti
MRSKAVVALLLLSILCLSGVSCEKVLFLIPFPGSSHWLMFKHFIRELTERGHEVTAVTSYKFGEAIDNYTEVLIDPSYPILEKLTILPVPISAVYSSQDYQNDFKNLLLYWRLGLETSRYALESANVQKFIKREDQHFDLIVAEQFFQESLLMFAHKFDAPIITISTIGYSDYMDRAMGLLTPWSFVPHMLLDCDDQMSFYQRAYNVLLSTVDYIGRELYYLPQQNKLAMEIFDRFVDHHGPLPTVQSLEKSISAMLVNSHQTLAKPRPSMVGIANIAGAHIKPPKPLPQDLQKFMDEAEHGVIYFSLGAYLQSSLMPLEKRSILLNVFAKLQQRVIWKYESGDLTDVPDNVLIRRWAPQNDILAHKNVILFISHGGLFGTFESMHHGVPTLFIPFFADQPRNAARGVRSGYARKLSFKDITEDSLFENIREMVQNKEYSTRAQEISVIFRDRLVDPMNESIFWMEYVMRNKGARHLKSQAVNLSLVQYLLLDIVASVLVAGVVFEMVLKVCCLCRKQKDTRYKKKQN

SEQ ID NO: 8260 - protein, 450 aa, Condylura cristata
MSLQWTSVLLLLRMSCYFSFGSCGKLLVWPTEYSHWISMKTILDELAERGHEVVALTPTTSIQMDSSKPSAIKFEVVPSSLKKEDWEHHVGQLLSLWTNDTAKDVPWRYLQKIKELFWKSFDLAEIGCKDVILNKDIMAKLTQESGFDLILADAYFVSFLPSGKPTTLFELMGKAEMWLIRDYWNFGYPHPLLPNFEFVGGFHCKPAKPLPKEMEEFAQSSGENGIVVFSLGSMISNLPEERANVIASALAQIPQKVLWRFDGKKPATLGANTRLYKWLPQNDLLGHPKTKAFITHGGANGIFEAIYHGVPMVGIPLFVDQPENMAHMKVKGAAVVLDIQRMSSTDLLNALKTVINDPSYKENVMKLSRIQHDQPMKPLDRAVFWIEFVMRNKGAKHLRPASHDLTWAQLHSLDVIGFLLACVATAVYGITKCCLFCCRKVVKTRKDKRE

SEQ ID NO: 8261 - protein, 538 aa, Tupaia chinensis
MRSEKWAAAMLLLQLCFAGCGFCGKVLVWPCDMSHWLNLKIVLEELTKKGHEVTVLVSSQSFLIDYSKPSAINFEVLPGSLDRETYLRQLNSFLDLAVNVMPTLSRLQSAKKLQEFMAEVTVRHKVFCESVTSNHSLMMKLQETKYDVMVIDPALPCGELVAEWLALPFVYTLRLSMGGTLEKYCGQLPSPPSYVPVPMGELTDRMTFMEKMKNMLLKRVKNMLLTFFFDIWIKQYDNWLWDQFYSEVLGRPTTLCEIMGKAEIWLIRTYWDFEFPRPYLPNFEFVGGLHCNHSKPLPKEMEEFVQSSGEDGIVVFSLGSMVKNLTDEKANIIASALAQIPQKVLWRYKGNKPAALGANTRLYDWIPQNDLLGHPKTKAFITHGGTNGIYEAIYHGVPMVGIPMFADQPDNIAHMKAKGAAVDVNMNTMTSADLLNALKTVINEPSYKENAMRLSSIHHDQPVKPLDRAVFWIEFVMRHKGAKHLRVAAHDLTWFQYHSLDVIGFLLACIISAMFLVTKCCLFFYKKFHKTEKKKKRE

SEQ ID NO: 8262 - protein, 530 aa, Ochotona princeps
MSRKCISVLLLLLQLSCCFRSGSGGKVLVWPMEYSHWMNLNVILDELVRRGHEVIVLRNSASIFLDPSKHTGIKFETFPVSFTKNDLENFFTQWVTNWTETDKDSYWKYLLALQDIFGVYSGLYEILCKEAVLNKQLMAKLQEAKFDVILSDAIGPCGELLAELLQTPFVYSLRFSPAYTMEKYSGGLISPPSYVPLILSDLSGKLTFMERVKNMLSMLYFDLWFQIFNEKQWDQLCSEVLGRPVKFYDLVGKADMWLIRSYWDLEFPRPTLPNVHFVGGLHCKPAKPLPKDMEDFVQSSGEEGVVVFSLGSMVGNGTEERANVIASALARLPQKVLWRFDGKDPKSLGPNTRIFKWIPQNDLLGHPKTRAFVTHGGANGIYEAIHHGIPMVGIPLFGEQPDNIAHMTAKGAAVRLNWKTMSSADLLNALRTVINDPSYKENIMTLSRIHHDQPMKPLDRAVFWIEHVMRHKGAKHLRVAAHDLTWYQYHSLDVIGFLLACVTIISFLIIKTCLFICQKFADIGRKKKRD

SEQ ID NO: 8263 - protein, 238 aa, Ursus maritimus
MEEFVQSSGENGIVVFTLGSMIKTMPEERANTIASALAQIPQKVLWRFDGKKPDTLGPNTRLYKWIPQNDLLGHPKTKAFITHGGANGIYEAIYHGIPMVGIPLFADQPDNIAHMKAKGAAVSLDFHTMSSTDLLNALRMVINDTSYKENAMTLSRIHHDQPIKPLDRAVFWIEFVMRHKGAKHLRPASHDLTWFQYHSLDVIGFLLACVATAVFVTTQCCLFCYRKCAKRGKKEKKE

SEQ ID NO: 8264 - protein, 361 aa, Ovis aries
MYSLYSTPGSSVEKKSGRLPFPPSYVPVMLSELSDHMTFMERVKNMIYALYFEFWFQAYNEKKWNQFYSEVLGRPTTLVETMGKAEMWLIRNYWDFSFPRPRLPNFEFVGGIHCKPAKSLPKEMEEFVQSSGEHGIVVFSLGSMVSNMSEERANVIASALAQIPQKVLWRYDGKKPDTLGLNTQLYKWLPQNDLLGHPKTKAFVTHGGSNGVYEAIYHGVPMVGLPLFADQPHNIVHMKAKGAAVRLDLETMSTEDLLNALKEVINNPSYKQNVMRLSAIHHDRPVKPLDLAVFWIEFVMRHKGAKHLRPAIHNLTWLQYHSLDVIGFLLACVATAAFVVTKCCLFCYRKFAGKGKKGKRD

SEQ ID NO: 8265 - protein, 526 aa, Geospiza fortis
MAGKEVAVLVLLAVLGWGSGGKVLVWPADNSHWLNMEHILQELVARGHEVTVLLPSCFLIVNPTKPSPFQFEVMQVPFSQETLDAFMEDFLNFWMNEAFNLFPWEIMWTMKEQLEVFTNMSKQTCDTLVMNSRLLAKLQQAKFNVLIADPLSVGGELVAEMLEIPFVYSFRFSEGNVVERLCGGLPSPPSYVPASTMGLTHHMSFMERLQNLLFYIFTDLFFMKFWRDEWDGYYSNVLGRPTTLCETMGKAEIWLIRTYWDFEFPRPFLPNFEFVGGLHCQPAKPLPKEMEEFVQSSGEHGVIVFTLGSMVHSLSDEKSNVIAKALSQLPQKVLWRYKGKKPETLGSNTRIFDWIPQNDLLGHPLTKAFITHGGTNGLYEAIYHGIPMVGIPMFADQHDNLAHMVAKGAAVQVDFNTMKTQDLVDALKTVIYNSTYKENALKLSKIQHDQPVKPLDRAVFWIEFVMRHKGAKHLRPAAHHLTWYQYHSLDVLAFLFTCTATIVFILFKCCLCCCRRCGRIAKRKTE

SEQ ID NO: 8266 - protein, 531 aa, Oryctolagus cuniculus
MSVKYVSILLLLLQLSCCFSSGSCGKVLVWPMEFSHWMNMKTILDALVQRGHAVTVLRSSASILVNSNDESGITFETFPTTSTKDEMEAFFMYWLNKLTNDVSKDALWEYFQTWQKFFMEYSDNYENICKDLVLNKKIMAKLQESRFDVVLADPIAPCGELLAELLNRPLVYSVRFTPGYTYEKYSGGLLFPPSYVPVIMSDLSGQMTFMERVKNMLWMLYFDFWFQMLNVKRWDQFCSEVLGRPVTFSELVGKAEIWLIRSYWDLEFPRPLLPNSYFVGGLHCKPAQPLPKEMEEFVQSSGEEGVVVFSLGSMISNLTEERANVIASTLAQLPQKVLWKFDGKKPDNLGTNTQLYKWIPQNDLLGHPKTKAFITHGGANGVFEAIYHGIPMVGLPLFADQHDNLAHMRAKGAAIRLDWKTMSSSDFLNALKTVINDPSYKEKAMTLSRIHHDQPMKPLDQAIFWIEFVMRHKGAKHLRVAAHDLTWFQYHSLDVIGFLLACLTITTYLVIKCWLLVYQNILMTGKKKKRD

SEQ ID NO: 8267 - protein, 482 aa, Cricetulus griseus
MTAALLLLQLSGLFGSGNGGNVLVWPMEYSHWLNLRAILDELVKKGHEVTVLIPSASLSYEVEDTSAIEFETYPSSYSTADVEKLFMESIRKQINEMPKKSFWRYFLMLQEVVWLYSDYFESLCKDVVFNKELMTKLQTSSFDVILADPFIPCSDLLAEILKTPLVFSLRFFPGSTYEKYSGGLPLPPSYVPPAMSEMGDQMTFMERVQNVLYVLFFDFWFQTFNEKKWNQLYTEVLGRPTTLLEIMGKADIWLIRTYWDLEFPHPVLPNFDFVGGLHCRPAKPLPKVLWRFEGKKPDTLGSNTRLYKWIPQNDLLGHPKTRVFITHGGTNGLYEAIFHGIPMIGIPLFGDQFDNVVHMKIKGAGVRLDFLTMSSTDLFNAVKTVTTDPSYKENAMRLSRIHHDQPVKPLDRAVFWVEYVMRNKGAKHLRVAAHDLTWFQYHSLDVLGFLLACVVTVIFIITKCCLFCCQKFAKGGKKKKRE

SEQ ID NO: 8268 - protein, 532 aa, Lingula anatina
MLQKKTVTTMAMAKTSLTLIIATVCMFLENVNGSKILLYPYAHVYNSRLLNMMKIGQMMFARNHSVTMLVAGNVGPVLDKVPKEIHVKKINLTIPPFNLSGEMLIHKVRTNAFYFVPQWLDYAKEMMDALFGDKTLLGELRSEKYDLMFLDIIAPEGLLLMDYLNIPSVGYSNFGLDNNWDVSPPNNPSYMPNALSAFSEQMTFWERLVNTVSITAMNLMKKWTMTPCYEAKVKYNLNTSLSIESAYTRLSLLIVNSDFVFDYPRPVFPWVKPVSGVLFHPPKPLPKELDQFVESSGDAGFVILSFGTLIPELTAETAAMVARVFARLPQKVIWRNTITNISGLGHNTKVLPWIPQNDLLGHPKARLFITHCGVSSSHEVLYHGVPVVAVPLFVDQFGHARKLVERLGMGEELDFFNFTESAFSGTVLNVLNNPKYFKNAKRAAATVRDQPMDGKEALMFWVEYAIRNNGSLHFHSQGMERLSWYQYLLLDVVGVLFSTVVTVVALIYFSCKAIYRYISKIWPLSKRKNKTE

SEQ ID NO: 8269 - protein, 448 aa, Bos mutus
MHKMSMQWLSLLLLLQLTCYFNSGSCGKVLVWPMEYSHWMNMKTILDELVTRGHEVTVLTPSVTTFIDPKKPSSLKLETFPPSLTKEESENFVKLFVEAWMHAVRDSFWNHLSMVQSLFWGYSDILMKMCKEVVSNKKLMTKLHEERFDVIFADAVGPCGRPTTLVETMGKAEMWLIRNYWDFSFPRPRLPNFEFVGGLHCKPAKSLPKEMEEFVQSSGENGIVVFSLGSMVSNMSKERANVIASALAQIPQKVLWRYDGKKPDTLGPNTQLYKWIPQNDLLGHPKTKAFVTHGGSNGIYEAIYHGIPIVGLPLFADQPHNIVHMKAKGAAVRLDLETMSTEDLLNALKEVINNPSYKENMMRLSAIHHDRPVKPLDLAVFWIEFVMRHKGAKHLRPAVHNLTWLQYHSLDVIGFLLACVATGAFVITKCCLFCYQKFAGKGKKGKKD

SEQ ID NO: 8270 - protein, 529 aa, Carlito syrichta
MSMKWVSVPLLIQLSCYFSSGSCGKVLVWPTEYSHWLNMKTILDELVQRGHEVTVLASSISILVDPNKSSTIKFEVYPTSLTKNDYKNTITRVINLWTHAPKDTFWSFFSQVQEIMWDFSNVFKKLCEDTVLNKKLMRKLQEARFDVLLADTIGPGGELLAELLKIPFVYSLRFSPGYVLEKYGGGLLFPPSYVPIILSELSDQMTFMERIKNMIYVLYFGFWFQTFDMMKWDQFYSEVLGRPTTLLETMGKAEMWPIRTYWDFEYPRPLLPNFDFVGGLHCKPAKALSKEMEDFVQSSGENGIVVFSLGSMVSDMTEERVNVIASALAQIPQKVLWRFNGKKPDTLGPNTRLYKWIPQNDLLGHPKTKAFITHGGTNGIYEAIYHGIPMVGLPLFADQPDNMAHMKTKGVAISLDYHTMSSTDLLNAVKTVIHNPLYKENAMKLSEIQHDQPMKPLDRAAFWIEFVMRHKGAKHLRVAAHDLNWFQYYSLDVIGFLLACVATVIFTVTKCCLFFFQKFAKTERKGKKD

SEQ ID NO: 8271 - protein, 529 aa, Chrysochloris asiatica
MSVKWVPLLLVIQLSCYFSSGRCGKVLVWPTEYSHWINIKTILDELIQRGHEVTVLTSAASVLINPNMASAIKFEVYPTSFNKEEIEISFMSWINEWTRKSKESPWKHFPEIQKIFWEYSDYLERLCKDVVYNKKLMMKLQESRFDVILADAVGPCGELLAQIFKIPFLYSIRFTTGYKYEKYSGGLLAPPSYVPVVMSELSDQMTFMERIKNMIYTLYFDFWFQTFNEKKWDQFYSEVLGKPTTLSETMGKAEIWLIRTYWDFDFPRPFLPHFDFVGGLHCKPARPLPKEMEEFVQSSGKHGIVVFTLGSMVRNITEEKARMIASALAQIPQKVLWRFDGKKPDTLGSNTRLYKWLPQNDLLGHPKTKAFITHGGTNGIYEAIYHGIPLVGIPLFADQPDNIAHMKTKGAAVSLNIDTMTSTDLLNALKTVINDPFYKENAMRLSAIHHDQPVKPLDRAVFWIEFIMRHKGAKHLRPASHDLTWYQYYSLDVIGFLLACVAIVTFVIIKCCLFSYKKLFKRGKKKKRE

SEQ ID NO: 8272 - protein, 445 aa, Bos taurus
MSMKWLLLLQLLQLTCYFSSGNCGKVLVWPVEFSHWMNMKTILDELVMRGHEVTVLQSSASTLIDPNKPLAMKFETFPVSLTKDDFQTLAKILIETWMLAVKDFFWIHLSTIQSLFDEFSDIGMKICSEVVSNKKLMTKLQESRFDVVLADAVGPCGEPTTMAELMGKAEMWLIRNYWDFSFPRPRLPNVEFVGGLHCKPAKPLPKEMEEFVQSSGEHGIVVFSLGSMVSNISEERANVIASALAQIPQKVLWRYDGKKPDALGPNTWLFKWIPQNDLLGHPKTKAFITHGGSNGIYEAIYHGIPMVGLPLFADQPHNIVHMTAKGAAIRLDLETMSTEDLLNALKEVINNPFYKENIMRLSAIQHDQPMKPLDRAIFWIEFVMRHKGAKHLRPASHNLTWFQYHSLDVIGFLLACVTTVVFVITKCCLFCCRKFASIGKKRKRD

SEQ ID NO: 8273 - protein, 446 aa, Orycteropus afer
MSAKWISVLLLIQLSCYFDSVTCGKVLVWPTEYSHWINIKTILDELIQRGHEVTVLTSSASILIDPNKSSDIKFEVYPTSLTTPDLEILFMKWIKKMTYNMPKDTFWAYFSRLQEIFWEYSDCIERLCKDVVFNKELMIKLEESRFDVVLADAIGPCGRDTTLIETMGKAEIWLIRTYWDFEFPRPFLPHFEFVGGLHCKPANPLPKEFEEFVQSSGKHGVVVFTLGSMVRNVTEERANTIASALAQVPQKVLWRFDGKKPDNLGPNTRLYKWLPQNDLLGHPKTKAFITHGGTNGIYEAIYHGIPMVGIPLFADQPDNIAHMKAKGAAVSLDIKTMTSADLLNALNSVINESSYKENAMKLSAIHHDQPVKPLDRAVFWVEFVMRNKGAKHLRPASLSLTWAQYHSLDVLGFLLACVAIVTFLVIKCCSFGYQKFFKTEKKEKKD

SEQ ID NO: 8274 - protein, 524 aa, Lingula anatina
MRIATTALWCVAVLVVSTQVEDISSSKILLIPYIHQQTSRLMNMVKIGQMLSEHNHDVAMLLPSNCVPKNVPEKVRTITFKLDTFPFEISEETFLHEMRKDPFVFMSGWIEYSRDLLDSLFNDSGVMLKMVSEEFDLVFMDVISPQGLIVRDYLDIPGVGYSNLGFGNDRYFSSPLNPSYVPSPTGKFSDRMDFWERLTNALSILGARYVTGKMRVPFSEAKLKYNLNTSLSLWEAQTRLSLVIVNVDFVFDYPRPVMPWVKPVSGLLFHPAKPLPEELERFVQSSGEHGIIIMSFGTMIAGFSSETMAMIARVFARLPQKVILRNAKSNVQGLGNNTKVLPWIPQNDLLGHEKARLFITHCGVSSSHEALFHGVPVIAVPLFFDQFSHAKKLVQRIGMGEELDFYNLTEQAFEAKIKSVLTNPSYYESAKRASALVRDQPMNGKEMMRFWIEYVIRNKGTMHFHSQAMERLNWFQYLLLDVMGFIIITTFCGLIVIWIICKFVLCSLVPKIYRRKPDVKTKGE

SEQ ID NO: 8275 - protein, 331 aa, Mandrillus leucophaeus
MSELRDQMTFMERVQNMIYTVYFDFWFQVWDIKNWDQFYSKVLGRPTTLFEIMAKAEIWLIRNYWDFQFPHPLLPNVEFVGGLHCKPAKPLPKEMEEFVQSSGDNGVVVFSLGSMVSNMSEERANVIASALAKIPQKVLWRFDGNKPDTLGINTQLYKWLPQNDLLGHPKTRAFITHGGANGIYEAIYHGIPMVGVPLFADQPDNIAHMKAKGAAVSLNFNAMSSTDLLNALKTVINDPLYKENAMKLSRIHHDQPVKPLDRAVFWIEFVMRHKGAKHLRVAAHDLTWFQYHSLDVIGFLLACVATVIFIITKCLFCVWKFVRTGKKGKRD

SEQ ID NO: 8276 - protein, 545 aa, Poecilia latipinna
MLLPSSLLLILSFLTWSPSATRAGKIIVVPPIMFESHLYIFKTLATALHPEGHETHFLVSEGREVPPSPHYHLQRYPGIFNSTTADNFLQSKVSNIFSGRLTFLELFDILDHYSQNCDAVVGNGEVMNRLKEAKFDLLLVDPNEMCGFVIAHILGVQYAVFSTGLWYPAEVGAPAPLSYVPEFNSLLTDRMSLMQRIANTGVYLAQRFGVHYIVLPKYDRIMKKHGVKPYAAMADLVQGSRLWMLCTDMALEFPRPTLPHVVYIGGILTKPPSPLPQSFQALVNDTAEHGFVVVSFGAGVKYLSQDIAHKLAGALARLPQRVIWRFSGVAPSNLGNNTKLVDWMPQNDLLGHPHTKAFLSHGGLNSIYEAMYHGVPVVGVPLFGDHYDTMTRVAAKGMGVMLHWKDMTEKDLYASLSSVINDPRYRQQARLLSNIHKDQPGHPVTRAVYWIGYILRHSGANHLRSAVYEVPPYQYFLVDVLLAVAAAGALIVFLLHRLVRLLRGKAGDHSRRVDGSMTNGHCHSESIANGKHKRNGSLKSEKKIN

SEQ ID NO: 8277 - protein, 410 aa, Camelus bactrianus
MKTVKGFCVLFMLHLGFFDSGRTGKVLVWPADFSHWINIKVILEELHRRGHEITVLVPSPSLLLDHTKIPFNVEIFQLPVTKETLREELDTNIYTVSFELPKLSWWDILCDKWDAYYSKVLGKPTTLCETMGKAEMWLIRTYWDFEFPQPYLPNVEFVGGLHCKPAKPLPKELEELVQSSGEDGVVVFSLGSMVKNITEEKANMIASALAQIPQKVLWRYTGKKPDTLGANTQLYEWIPQNDLLGHPKTRAFITHSGTNGVYEAIYHGVPMVGIPLFGDQHDNIARVKVKGAAVEVDLHTMTSSDLLNALKEVINNPFYKENAMKLSRIHHDQPVKPLDRAVFWIEFVMRHKGAKHLRPALHNLSWYQHHSLDVIGFLLACVATIIFLVTKCCLFCCSRFGKTTKKKKRE

SEQ ID NO: 8278 - protein, 445 aa, Miniopterus natalensis
MAMKWIFILLLLQLSCHVRPGWCGKVLVWPTEYSHWMNMKTILDELVQRGHEVTVLTSSASILVDPNKPSAINFEIYPTSLTKDDFEHIFMQVLSKWIYIPDDTFFSYFSQMQDMLWELYISFRKLCKDVALNKKLMTKLQETRFDVILADPFGPCGRPTTLFELMSKAEMWLIRTYWDFEFPRPFLPHFVFVGGLHCKPAKPLPKEMEEFAQSSGQNGIVVFTLGSMVSNISEERANVIASALAQIPQKVLWRFNGKKPDTLGPNTRLYKWIPQNDLLGHPKTKAFITHGGTNGIYEAIYHGVPMVGIPMFADQPDNIARMQTKGAAVRLDFNTMSSADLLNALKTVINDPSYKENAMRLSRIQHDQPMKPLDRAVFWIEFVMRHKGAKHLRPASHDLTWFQYHSLDVIGFLLACVATAIFVITKCVLFCCQKCANPGKKGKRE

SEQ ID NO: 8279 - protein, 530 aa, Cavia porcellus
MSMKWISALLIPQFLCSFNIGSCGNVLVWPMEYSHWMNMKIIVEELIQRRHEVTVLIPSSFIFVGVNASSGVKFETFPTSLRRDQLEEFYTRMISNWMDIGSITTCLSYFPVMEEMLKEYSANWEIVCKDVVSNKNLVTKLQESNFDVLLADPVAPCGELVAELLKLPFVYSLRFSPGFQLEKSAGGLPFPPSYIPVLMSRLSGEMTFMERVKNMICMLYFDFWIEVFNQKNWNKLYSETLGKPTTFYEQMQKADMWLIRSYWDLEFPRPTLPNFEFVGGLHCKPAKPLPKEMENFVQSSGDHGIVVFSLGSMVSDMSEATANAIASALGQIPQKVIWRFDGKKPDTLGANTQLLKWIPQNDLLGHSKTRAFITHGGANGVYEAIYHGIPMVGIPLFAEQHDNIVYMEAKGAAIKLDFHTISTTDLLNALKKVINNPSYKHNAMRLSSIQRDQPMRPLDRAVFWIEFVMRHKGAKHLRPLAQNLTWYQYHSLDVIGFLLACAAIITFVPIKCCLFCFQKFVKTGKKKKRE

SEQ ID NO: 8280 - protein, 445 aa, Mandrillus leucophaeus
MSVKWTSVILLIQLSFYFSSGSCGKVLVWAAEYSHWMNMKTILEELVQRGHEVTALASSASIVFDPNNSSALKIEVFPTSLTKTEFGNIVTQEVKRWIDLPKDTFWLYFSQTQEIMWKFGDISINFCKDVVSNKKLMKKLQESRFDVVLADPIFPCRRPTTLSETMGKADIWLIRNSWNFQFPHPLLPNVDFIGGLLCKPAKPLPKEMEEFVQSSGENGVVVFTLGSVVTNMKEERANVIASALAQIPQKVLWRFDGNKPDTLGLNTRLYKWIPQNDLLGHPKTRAFITHGGANGIYEAIYHGVPMVGIPLFADQPDNIAHMKARGAAVRLDFHTMSSTDLVNALKTVINDPLYKENVMKLSRIQHDQPVKPLDRAVFWIEFVMRHKGAKHLRPAAHDLTWFQYHSLDVIGFLLACVATVIFIIMKCFLFCFWKFAGKGKKRKSD

SEQ ID NO: 8281 - protein, 473 aa, Trichoplax adhaerens
MGGSHVLTMDIITQQLIERGHETVTIISNQPGQLRKMKPSPTVLYNVENPIIAGQRAANVTKLSLIGLVQSLFEIQRQYCEATLANDTLVRLLDDVDIFVTDSLYICGVLVPEMLQKPNIIISLGADIIGYHTFLADYADSTYIPMLGFFHSTKLTMIQRAFNAAIKQFLLITYSYMSSNLMNSLRYKFNISTQSSHYRIKRNPSLFLAACDFALEYPRPLPPNIKVIGPLSPRPSSSLSKELEDYMQASDNGIIVLSLGTELQLPKVKATEMLKALAQIPYRVLWKGNQPEETISDNVKVIKWMPQNDILGHNKTVGFITHCGANGLYEAAYHGVPMIGMPSMIEQKGNAGRMVSAGIGVLINYHQFQAKDIVKAVQEITTNGRYKENVMKVSRILKSRPRAPRDVVVDWVEYVANTNGAHHLKVKGEELWLYEYYNLDVCLFIAMIMYFIYLMMRVCKNMMLGKQSKLKDD

SEQ ID NO: 8282 - protein, 530 aa, Oryctolagus cuniculus
MSTKWISVLLLLQLSCYFSSGRCGKVLVWPVDYSHWINIKTILDELAQRGHEVTVLKPSVSVLLDSNKSLGIKFEIFPTSISKDEYEMVFTEELMNFVLELPKYPFWKYFSKLQEMSMEESDFSENICRDAVLNKTLVTKLKESRFDVILADALCPCGELLAELLEVPFLYTHRVFPGYTYEKYSGGLLFPPSYVPVIMSQLTDKMTFMERVKNMLYVLYFDFWFQTFNEKKWDRFYSEVLGRPTKLTELMGKADMWLIRTYWDVEFPRPLLPNVEFIGGLHCRPAKPLPKEMEDFVQSSGEEGVVVFSLGSMISNLPEERANVIASALARLPQKVLWRFNGKKPDTLGPNTQLYKWIPQNDLLGHPKTKAFITHGGTNGVYEAIHHGVPMVGLPLFGDQFDNIVHMEAKGAAIKLDIITMSSSDLLNALDTVIYDPSYKENAMRLSRIHHDQPTKPLDRAVFWIEYVMRHKGAKHLRVAAHDLTWYQYYCLDVIGFLLVCVATAMFIIIKCCLFCYWKFVKTVKKSKRE

SEQ ID NO: 8283 - protein, 528 aa, Tupaia chinensis
MKWTSTLLLLQLTCCFSFGSSGKVLVWPTEYSHWINMKIILNELTQRGHEVTVLTSSASILVNPNEKSTIKFEVYPTATTKDNFEILFMQMINKWIYDIPRDTFFEYFKQAQEVLWAYFGHIQKLCKEVVLNTKLMTKLQESRYDVILADPIGPCGELLAELLKIPFVYSLRFSFGSTWEKYSGAVPFPPSYVPVVMSELTDQMTFMERVKNMIYVLYFDFWFQSLDEKNWDQFYSEILGRPTTLSEIMGKADIWLIRTYWDLEFPRPLLPNFDFVGGLHCKPAKPLPKEMEDFVQSSGENGVVVFSLGSIVSNMTEDRANVIASALAQIPQKVVWRFDGKKPATLGSNTRLYKWIPQNDLLGHPKTKAFITHCGTNGIYEAIYHGIPMVGIPLFGDQPQNIAHLKAKGVAVRVDFNTMSSTDLLNALKTVITDPSYKENAMKLSRIQHDQPIKPLDRAVFWIEFVMRHKGAKHLRPAALDLNWFQYHSLDVIGFLLACAATVIFIILKCCLFCCRLFTKKGKKEKRQ

SEQ ID NO: 8284 - protein, 521 aa, Capitella teleta
MKLLYLFMLLGFCREERFLLASMQMLSHVKKVVHIEKSLVQRGHHVYVILADDHPLNEQMRQKQGFQVLTYERRSETPSIYSQAMVERLKQIVFNSNLIEDGKFFFEMSSACMEECKVMMQDQRLMHQLKEIGFTMAVIDGFPLAPCHVVLPFYLNIPFVLETGAFGMERPSKSPVMASFQPHPMWSISPQNMVFWQRIVNSLLHFFMPFDYSVPVPALSDMSLIDKYAPQFSSWKELIEQAELFITTRDHLLDWPTPYMPNVISVPGLGAQPAQSLEKHPELVATMQSLHGAIVVSFGSSVPEFPKTFLKKLVDAFARVSQQVVFRYPFSIPSTVIVPDNVYIYTSWMPQNDLLGNSNTTLFITHCGNNGQYESLYHGVPMIGIPMFAEQYQNCHRAEAHGYGLDMKGVRFSTDDLVAAINEVNQNPLYRNNTKRASLIMKKAALPPMERVAIAIETVMELGGNHLRSAAYDLHWTQYALLDVALVLCIVILILAYVACSLANWMWSEGAKRLSAHAKSD

SEQ ID NO: 8285 - protein, 521 aa, Pieris rapae
MGIMGAFKFWSLLSLLVYFCDAANILFVIPFTTRSHYINLKPIGLELARRGHNVTVITPYRENKHPPNYHQVMVKDTKIWDALGKERPNVFTMVDLTAEEFHNEILWPGGLALTEEALQSSEVQALLRSNTTFDLVVNEQFFQEAFYALATVYNAPLALVTTHGNCMKHNFLTRNSLQWATVTHELLDLHHQTSFLGRLRNMYFSVYELFWWKFWYLEKQEELMRKYIPGLPQKMPSLYDVQKNASLMLLNNHFSVDTPTAYLPNVVEIGGIHVTNSTGALPEDLQKCLDGAVNGVVYVNFGSNVQSSELSQEKKQAFINVFRRLKQTIIWKWEDDKLEDKPKNVIIRKWLPQVEILAHPHVKVFVSHGGLIGTQEALYHGVPLISVPIYGDQLNNVLTLEQLGVGKLLNYHEINEEKLYQLLDEILNNNSYMAKAKEVSKRFVDRPLNALDTAVFWLEYVIRNNGANYMKNPAKDLSWFAYTMIDVYLFIAFIILILMNVSIMLCKFLFFNRILNKMKID

SEQ ID NO: 8286 - protein, 529 aa, Microtus ochrogaster
MPVKWMSALLLLQITCYFRSGSCGKVLVWPLEYSHWMNLKIILDELVQRGHEVTVLRPSSSVFLDPKKASGLKYETFPTTTNNDKVEKFFTEWVNRWIYDVPKDSCWRYYPSFNILFGQFSDFILNLCRKVVSNKQVMAKLKESKFDVVFSDAIGPCGELIAEVLHISFMYSLRHAAGYGLEKFSAGLSFPPSYVPIITSKLSGQMSFMERVENMICLFYFDFLFESFPAKDWDPFFSEILGRPTTMVDTMKKAEMWLIRSYWDLEFPRPTLPNIEFVGGLHCKPAKPLPEEMEEFAQSSGEHGVVVFSLGSMIRNTTKERANAIASALAQIPQKVFWRYEGIEPDTLGPNTRIFKWIPQNDLLGHPKTRVFVTHGGANGIYESIHHGVPMVGIPMFAEQYDNIAHMVAKGAAASVDFHTMTSSDLLNALKEVINNPSYKKNVMYLSTIHHDQPMKPLDRAVFWVEYVMRHKGAKHLKPLAFNLTWYQYYSLDVIGFLLACVAATIFLTIKCCLFVYRFFVKKQKNKKE

SEQ ID NO: 8287 - protein, 517 aa, Polistes dominula
MRLVVLFSLAFIICQSSMIDGYRILGLFPINGKSHWVMIEALMRGLAERGHQVDVFTFFKTKNQHTNYNEILITDNIGSPVNNVTATDILRFTGVNIAHLAQVAGYSLCELIDNPKIKNIIANPPKDPPYDLVIVELFAAHCYLAFGRHLKVPTVGLMTSPFHDWNSHLLGTPNEAAYVPNIFSSFSQNMTFVERLTNTLMIHYLQMQMDYHTNKQSELVKKYFNMDTTITDLFKELSLVLVNSHHSLHGIRSFPQSVIEVGGLHLSNNNTDPLQPEVQKWLDDSKDGCIYFTFGSMVRIETFSKELMEIFYKSFEKIAPTRVLMKVAKKEDLLPGLPKNVMTQSWFSQIPVLKHKNIRGFITHGGLMGTTESIFCGVPMIGIPLFGDQKVNIQNYVKRNVAISLGSIQEVTEEKLTNALKAILNDPSYMTNVKKLSETFNDRSEPALSKAMYWVEYVVKHKNILQSPAIFMPWWQRNLFDVYGSVALVLILVILIIYYIIKFVWKFVTRKNQQKVE

SEQ ID NO: 8288 - protein, 528 aa, Macaca nemestrina
MSMKWTSALLLIQLSCYLSSGNCGKVLVWPTEFSHWMNIKTILDELVQRGHEVTVLAYSPSILPGPNNPSALKFEICPTSLTETEFEDSVTQLVKRWSDIPKDTFWPHFLQVQEMMWTYGDMIRKFCKDVVSNKKLMKKLQESRFDVVLADAVSPCGELLAELLKIPFVYSLRSSPGYAIEKHGGGFLFPPSYVPVVMSEFSDQMTFMERVKNMIYMVYFDFWFQAWDTKKWDQFYSEVLGRPTTLFETMAKAEIWLIRNYWDFQFPHPLLPHVELVGGLHCKPAKPLPKEMEEFVQSSGDNGVVVFSLGSMVSNMSEERANVIASALAKIPQKVLWRFDGNKPDTLGLNTQLYKWLPQNDLLGHPKTRAFITHGGANGIYEAIYHGIPMVGVPLFADQLDNIAHMKAKGAAVSLDFNTMSSTDLLHALKTVINDPFYKENAMKLSSIHHDQPVKPLDRAVFWIEFVMRHKGAKHLRVAAYDLTWFQYHSLDVIGFLLACVATVIFIITKCLFCVLKFVRTGKKGKRD

SEQ ID NO: 8289 - protein, 239 aa, Ictidomys tridecemlineatus
EMEDFVQSSGENGVVVFSLGSMVNNMTEERANVIASALAQIPQKVIWRYDGKKPPTLGPNTRLYKWIPQNDLLGHPKTKAFITHGGTNGIYEAIYHGIPLVGIPLFGDQPDNVMHMKAKGAALRLNFITMSSMDLLNALNTVINEPSYKENAMRLSRIHHEQPVKPLDRAVFWIEFVMHHKGAKHLRVAAHDLSWFQYYSLDVLGFLLACVATVIFIITKCCLFCCQKFTKPRNKKKRA

SEQ ID NO: 8290 - protein, 530 aa, Oryctolagus cuniculus
MSLKWNSLILLMQLSCCFSSGSCGKVLVWPTEYSHWINIKTILDELIQRGHEVTVLTSSASILVDPNKTSTIKFEVYPTSLMKDDLESLFTSWLRKWTYDFKKQTFWEYFSQVQEIFWEYSDCIKMFCKEVVLNKKLMAKLQDSRFDIILADAIGPCGELLAELLEAPFVYSLRFTPGYTYEKYSGGLMFPSSYVPIVLSELTDQMTFMERVKNMIYVFYFDFWFQTFNEKKWDQFYSEVLGRPTTLSETMRKADMWLIRTYWDLEFPRPFLPNFHFVGGLHCRPAKPLPKEMQDFVQSSGEEGVVVFSLGSMVSNMTEERANVIASALAQLPQKIFWRFDGQKPSSLGSNTRLYKWIPQNDLLGHPKTKAFITHGGTNGIYEAIYHGVPMVGIPLFADQPDNIVHMKAKGAAVRLDFNTMTSTDLLNALKTVIYNPSYKENAMRLSRIHHDQPTKPLDRAVFWIEYVMRHKGAKHLRVAAHDLTWYQYHSLDVIGFLLACVGTVVFIILECCLFSYKMFVKTGKKNKKE

SEQ ID NO: 8291 - protein, 528 aa, Unknown
  Description of Unknown: AHD74828.1 Sequence 14845 from patent US 8586006 sequence
MSMKWTSALLLIQLSCYFSSGSCGKVLVWPTEFSHWMNIKTILDELVQRGHEVTVLASSASISFDPNSPSTLKFEVYPVSLTKTEFEDIIKQLVKRWAELPKDTFWSYFSQVQEIMWTFNDILRKFCKDIVSNKKLMKKLQESRFDVVLADAVFPFGELLAELLKIPFVYRPRFSPGYAIEKHSGGLLFPPSYVPVVMSELSDQMTFIERVKNMIYVLYFEFWFQIFDMKKWDQFYSEVLGRPTTLSETMAKADIWLIRNYWDFQFPHPLLPNVEFVGGLHCKPAKPLPKEMEEFVQSSGENGVVVFSLGSMVSNTSEERANVIASALAKIPQKVLWRFDGNKPDTLGLNTRLYKWIPQNDLLGHPKTRAFITHGGANGIYKAISPRIPMVGVPLFADQPDNIAHMKAKGAAVSLDFHTMSSTDLLNALKTVINDPLYKENAMKLSRIHHDQPVKPLDRAVFWIEFVMRHKGAKHLRVAAHDLTWFQYHSLDVTGFLLACVATVIFIITKCLFCVWKFVRTGKKGKRD

SEQ ID NO: 8292 - protein, 530 aa, Mus musculus
MPGKWISALLLLQISCCFRSVKCGKVLVWPMEFSHWMNIKIILDELVQRGHEVTVLRPSAYYVLDPKKSPGLKFETFPTSVTKDDLENFFIQLLNVWTYELSRDTCLSYSPLMQNMFDELSGYYLSLCKDVVSNRQLMTKLQESKFDVLLSDPVAFGGELIAELLHIPFLYSLRFTAGYRIEKSSGRFLLPPSYVPVILSGLGGQMTFIERVKNMICMLYFDFWFQMPNDKKWDSFYTEYLGRPTTLAETMGQAEMWLIRSNWDLEFPHPTLPNVDYVGGLHCKPAKPLPKDMEEYVQSSGDHGVVVFSLGSMVSNITEEKVNAIAWALAQIPQKVLWKFDGKTPATLGHNTRVYKWLPQNDLLGHPKTKAFITHGGANSVYEAIYHGIPMIGIPLFGEQHDNIAHMVAKGAAVTLNIRTMSRSDVLNALEEVIENPFYKKNAMWLSTIHHDQPMKPLDRAVFWVEFVMRHKNAKHLRPLGHNLTWYQYHSLDVIGFLLACVAATVVLTVKCLLFIYRFFVTKKKKMKNE

SEQ ID NO: 8293 - protein, 571 aa, Pseudopodoces humilis
MKPYAPAFVLLWSAVGIARAAKIVVVPPIMFESHLYIFKTLASALHDQGHQTVFLLSEGREIPPSNHYRLQRYPGIFNSSTSDDFLQSKMRSIFSGRLTALELFDILDHYSKNCDMIVGNRDLMRALKQEKFDLLLVDPNEMCGFVIAHLLGVKYAVFSTGLWYPAEVGAPAPLSYVPEFNSLLTDHMNLFERIKNTVVYLISRFGVSFLVLPKYERIMQKHKVLPERSMYDLVHGSSLWMLCTDVALEFPRPTLPNVVYVGGILTKPASPLPEDLQAWVNGAHENGFVLVSFGAGVKYLSEDIANKLAHALARLPQRVIWRFSGNRPRNLGNNTKLIEWLPQNDLLGHSNIKAFLSHGGLNSIFETMYHGVPVVGIPLFGDHYDTMTRVQAKGMGILLNWKTMTESELYEALVKVINDPSYRQRAQRLSEIHKDQPGHPVNRTVYWINYILRHNGAQHLRAAVYSISLFQYFLLDIALVLLVGAALLYYVLARMTKLICKQSKHLWCNDKHSAVNGHYQNGIPNGKYRRNGHIKHEKKLEVPWLKEKGGKPVFCLVSLTNMGGVGMMTGC

SEQ ID NO: 8294 - protein, 530 aa, Dipodomys ordii
MTWKWISVLLLLQLSSYFHSGSCGNVLVWPMEYSHWMNMKVILDELIMKGHQVTVVRPSSAIFVDSNEASSIKFETFPSSSNTDEFSAVFSQMISLWTYELPRTTCLAYSPLLENLFMTFSDAMLNICKEAALNTELIARLRKARFDVVIADAVGPCGELLAELLEIPFVYTLRFYPGYTTEKYSGGLLLPPSYVPVILSGLSGQMTFMERVENMICMLYFDFWFETFDSKKWSSFYSEVLGRPTTLMETMSKAEIWLIRSYWDLEFPRPTLPNVDFVGGLHCKPAKPLPKEMEDFVQSSGDNGVVVFSLGSMFQNITEETANEIASALAQIPQKILWRFNGKKPDTLGPNTRLYKWLPQNDLLGHPKTKAFITHGGANGIYEAIHHGIPMVGIPLFGEQHDNIAHMVAKGAAVQLDIRAISSKDLLRALEAVINNPVYKKNAMWLSTIHQDQPMNPLDRAVFWIEFVMRHKGAKHLRPLSHNLTWYQYHSLDVIGFLLACVATVTFLVLKCCLFVYQKVLKKGKKEKSE

SEQ ID NO: 8295 - protein, 466 aa, Jaculus jaculus
MSVKWTSVILWIQLMSLFRLGTCGKVLVWPMEYSHWINMKTILDELVLRGHEVTVLVSSASILIDPSQSSAIKFESFSTSMTKESLEKFFSYWISQWTHNVQDISLWTFHSDIQEAFMQSSDMIQDFCRDAVLNKSLMEKLMTFMERVKNMIYVLYFDFCFQTVNEKKWNQFYSEVLGRPTTLFETMSKADIWLIRMYWDLEFPRPLLPNVHFVGGLHCKPAKPLPKEMEDFVQSSGEDGIVVFSLGSMVSTLTEEKANLIASALAQIPQKVIWRFDGKKPDTLGSNTRLYKWIPQNDLLGHPQTKAFLAHGGTNGLYEAIYHGIPVVGIPLFADQPDNIAHMISKGAAVRVDFNTISSADLLSALRTVLNDPSYKENAMRLSRIHHDQPVKPLDCAVFWIEFVMRHKGAKHLRPALHDLSWFQYHSLDVLGFLLACVLSVVFVITKCCLLCCGKFVKAGKKEKRA

SEQ ID NO: 8296 - protein, 238 aa, Camelus ferus
MEEFVQSSGEDGIVVFTLGSIVTNITEERANVIASALAQIPQKVLWRFNGKKPDTLGPNTRLYKWIPQNDLLGHPKTKAFITHGGANGIYEAIYHGIPMVGIPLFADQPDNIAHMTAKGAAVRLDFNKISRIDLLNALKQVINNPSYKQNAMRLSTIQHDQPVKPLDRAVFWIEFVMRHKGAKHLRPAAHNLTWYQYHSLDVTGFLLACVATAIFVITKCCLFCCQKFPKAGKKNKRE

SEQ ID NO: 8297 - protein, 531 aa, Microcebus murinus
MAMKLASVLLLMQLSGHFSSGTCGKVLVWPTEYSHWMNMKTILDELVQRGHEVTVLTHSVSILVDPKQATSIKFEVFPTSLTKSDFEDVIIQLINKWIYDLPKDTFWSYFSQVQEITWKFSEIMMKICKDAVLNKKLMTRLQESKFDVVLADAITPCGELLAEILKTPLVYSLRYSPGYQFEKSSGGLLFPPSYVPVVLSELNDQMTFMERVKNMIYVLYFDFWFQTFNMKEWDHFYSEVLGRPTTLYETMKRADMWLIRTYWDLEFPRPLLPNIEFVGGLHCKPAKTLPKEMEDFVQSSGENGVVVFSLGSMLSNMTEERANVIASALAQIPQKVLWRFDGKKPDTLGPNTRLFKWMPQNDLLGHPKTKAFVTHGGANGVYEAIYHGVPMVGIPLFADQPDNIAHMKAKGAAVRVDFNTMSSTDLLSALKTVLITYVEYKENAMKLSRIQHDQPMKPLDRAVFWIEFVMRHKGAKHLRVAAHNLTWFHYHSLDVLGFLLACVATAIFVITKCCLFFNRMFATAGKKEKRE

SEQ ID NO: 8298 - protein, 445 aa, Galeopterus variegatus
MSMKWNSVLLLLQLSCYFSSGSCGKVLVWPTEYSHWMNMKTILDELGQRGHEVTVLTSSASIHVDPNKTSTIKFEVYPTSLSRDAFDAFVLMVVKKWERIPKDRIWLHLSEMQEIMWDFSDCMRNMCKDAVLNTKLMRKLKESKFDVVFADAIGPCGRPTVLLETMAKAEIWLIRSYWDFDFPRPLLPNFDFVGGFHCKPAKPLPKEMEDFAQSSGEHGVVVFTLGSMISNMPEERANVFASALAQIPQKVIWRFDGKKPDTLGANTRLYKWIPQNDLLGHPKTKAFITHGGGNGVYEAIYHGVPMVGMPLFADQPDNIARMMAKGAAVRLDFDTVSSTDMLNALKTVINDPLYKENIMRLSRINHDQPTKPLDRIVFWIEFVMRHRGAKHLRVAAHDLNWVQYHSLDVIGFLLACVATVIFAITKCCLLCCQKFAKTGKKEKRE

SEQ ID NO: 8299 - protein, 445 aa, Ochotona princeps
MSLKQVSVLLLLLQLSCCFRSGNCGKVLVWPMEYSLWLNLNVILDELVRRGHEVIVLRNSASIFLDPSKHTGIKFETFPIDATKADSEAFFVQLVTTWTNALQDPYWEYLPALQKLFSGYSDDREFLCKAAVLNKKLMRKLQESKFDIIISDTFGPCGRPVTFYELVAKADMWLIRSYWDLEFPRPTLPNVHFVGGLHCKPAKPLPKDMEDFVQSSGEEGVVVFSLGSMVSNMTEERANVIASALAQLPQKVLWRFDGKKPETLGPNTQIYKWIPQNDLLGHPKTRAFVTHGGANGIYEAIYHGVPMVGLPLFADQPDNIAHMTAKGAAVRLNWKTMSSADLLNALRTVIHDPSYKENVMMLSRIHHDQPMKPLDRAAFWIEHVMRHKGAKHLRVAAHDLTWYQYHSLDVIGFLLACVTITTYLVIKICLSVYQKLVKTEKKKSD

SEQ ID NO: 8300 - protein, 520 aa, Aplysia californica
MGFYSTLFASFLAVTIQQTVFLGTVAEAKVVLFFSVPHTGVVRTHINVARSLADLGHEVWVAVPHYMLDRKVVDVTGVKVVEYGRYLDNFERKGFETLLSSDSNTFFKRVFGYKKIAEKMRGAFRQILNDTALMERIRSLEPDLMILFNMPGAREFVVLPYVLGIKFVFLGPYHDLHGYRVPFVPSASPFFLTPFDVNEELDLGQRIKNTLQNVALYLINEFVLSADLLSEFAPAKPWMSVPDMMLKAELFLVESDHILDVTKPLLPNTKLIGGTASSQAQPLRDPFKIFVENSENGVVVVSFGSSIVNLPQEVADKLASAFQRLNQTVVWRVNMTSSDPGKVMTSMWLPQNDLLAQAQTRLFVSHCGSSGQYEALYHGVPLLCLPLCCDQYYNAYRSSSKGFGLTADVFSTTDDQLYTIMAEILNNATYRDNIRRASKLFRELYKEPQAEAAFWIDHVMKYGGGYMRWAGQDIPQWQFLGLDVLACAVGCVVVIVSVVRVVSRMCLGISCRRERKLKSE

SEQ ID NO: 8301 - protein, 382 aa, Mus musculus
ILSDAIGPCGELIAELLQIPFLYSLRFSPGYYLEKYSGGLPLPPSYVPVILSGLSGQMTFKERVKNMICMLYFDFWFQTFREKKWDQFYSETLGRPTTLIETMGKAEMWLIRSYWDLEFPHPTLPNVYYVGGVHCKPAKPLPKEMEDFVQSSGEHGVVVFSLGSMVSNMTEEKANAIAWALAQIPQKVLWRFDGKTPATLGPNTRIYKWLPQNDLLGHPKTKAFITHGGANGLYEAIHHGIPMIGIPLFGEQHDNIAHMVAKGAAVTLNIRTMSRSDLLNALEEVIDNPFYKENTMWLSTIHHDQPMKPLDRAVFWIEFVMRHKGAKHLRPLAYNLTWYQYHSLDVIGFLLAFVTFIVALIVKCFLFVYRFFVKKEKKMKNE

SEQ ID NO: 8302 - protein, 446 aa, Fukomys damarensis
MSMKWISALLLLQLDCYFSFGSCGKVLVWPMEYSHWMNMKNIVEELIQRAHEVTVLRPSSFIFVDVNSSSGIKFETFITSTNDDQLEDIYIESVNKWMSVGSIDTCLAYFPVLEDTIRDYSAIWENICKDVASNKKLMTKLQESRFDVLLADPIAPCGRPTTLHEIMGKAEMWLIRSYWDLEFPRPSLPNFDFVGGLHCKPAKPLPKEVEDFVQSSGEHGVVVFSLGSMISSMTEERANAIASALAQIPQKVLWRFEGKKPDTLGSNTRLYKWLPQNDLLGHPKTRAFVTHGGANGVYEAIYHGIPMVGIPLFAEQHDNVAHMKAKGVAVKVEFMTISSTELLNALKKVLNSPSYKENAMWLSTIHHDQPMKPLDRAAFWIEFVMRHKGAKHLRPLAHNLTWYQYHSLDVIGFLLAGVVTITLLVVKCCFFISRKFLKMKKKKKRE

SEQ ID NO: 8303 - protein, 232 aa, Canis lupus familiaris
MELTFSSQEMEEFVQSSGENGIVVFSLGSMINNMPEERANVIASALAQIPQKVLWRFDGKKPDNLGRNTRLYKWIPQNDLLGHPKTKAFITHGGTNGIYEAIYHGIPMVGIPLFADQADNIVHMKAKGAAIRLDLSTMSSADLLDALRTVINDPSYKENAMKLSGIHHDQPIKPLDRAVFWIEYVMRHQGAKHLRPASHDLTWFQYHSLDVIGFLLACVATAIVVTTQGWPA

SEQ ID NO: 8304 - protein, 413 aa, Carlito syrichta
MSIKWTSVLLLIQMSCYFKSGGCGKVLVWPTEYSHWLNMKAILNELVQRGHEVTVLTSSASILVDPSISSSIKFEVYPTSLTKDDFENVLGELVDTWMYDLPKYNFCFQILDMKKWDQFYSEILGRPTTLSETMGKAEMWLIRTYWDFEFPRPFLPNVDFVGGLHCKPAKALPKEMEDFVQSSGENGVVVFSLGSMVSGLTEERANVIASALAQLPQKVLWRFNGKKPHTLGPNTRLYNWIPQNDLLGHPKTRVFITHGGTNGIYEAIYHGIPMVGIPLFADQPDNIAHMVTKGVALRVDFNTMSSTDLLNALKIVINDPIYKENAVKLSRIHHDQPAKPLDRAVFWIEFVMRHKGAKHLRAAVHDLTWFQYHSLDVIGFLLACVAAVIFTITKCCLFCFRKFAKTRKKGKRD

SEQ ID NO: 8305 - protein, 445 aa, Dipodomys ordii
MSLKWMSLLLLIQVMYCFNAGSCGKVVVLPMEYSHWLNVKIILDELVQRGHEVTVLTSSAAVHVDSGKSSPFKFETFPTPLTTKEFERHFKHSVNIWTYEFPKYSIWKLYSKMQSMFEEHSDVLESLCKYMIFNEKLRKTLQESKFDVLLADPVVPCGRPTTILELMAKADIWLIRTYWDFDFPRPLLPNFEFVGGLHCKPAKPLPEEMEKFVQSSGDQGVVVFSLGSIVSNLTEERANTIASGLAQIPQKVLWRYEGPKPETLGSNTRLYKWIPQNDLLGHPKTKAFITHGGTNGVYEAIYHGVPMVGIPLFVDQPDNIARMKAKGAAVRLDFTRFSSEELINALKTVINNPFYKENAMKLSRIHHDQPVKPLDRAVFWVEFVMRHKGAKHLRPAVHDLNWFQYHSLDVIGFLLACVATAIFIFTRCCLFCCRKFPKSRKKKRE

SEQ ID NO: 8306 - protein, 782 aa, Tribolium castaneum
MWSKVILFVFFVNYGNSANILGLYFHAGKSHHILGEMLLKELARRGHNVTMASPFPLKEPFPNYTDIHLTGILEDQIARESMFMKMNKGHALVGVNDVLELTRAQTELTLNHTEMAKLLKSGTKFDVIIIDWFMNGAILMYGKLFNAPIIPIASHGTTHLANYIVGNPAPPSYIPNAMLPFPPNMTFFQRMVNGLVTIAYNVVGHTNAKYHQALLEKYFENAPSLDELKDTVALVLSNGHYSFESPRPFVPNVIPVGGFHVQKARKLPTDLQKYMDEAKHGVVYFSLGSNMKSVLLPKEKQQQILKAFAKIPHKVLWKWEDDNLENKPDNVLIRKWFPQNDILGHPNLKLFITHGGLLSTIEALHHGVPVLGIPIFGDQKANIPNAVSSGYAVQLELADLDEATLTKALDEILTNPKYQENAKKRSQLLHDQPMSPMDTAVFWVEHVIRHKGAPHLRNLGSYLPWYQYLMLDVALFVVLFLLVVVGIVGFVIRKICGCCCQRKSKEKRDALRGAAAAASRRMSGCDPVCTKRQCSSVLNMFTLCMSRGHPPLQNAQQENNVANKQVKGGYLLRYKRGLFCNSWCEEWFVLYEDSTLAWFKDKGLNRPKGHLRISECPDLLAVGEWTRQVPKRPRFPRNYHVGQVLAVGTRIPQDVHWLMAQSAAEANDWMTAISNTLPPPPNLPPAKSKSFTFQKKSNNCYKCNSLKNEADYTLISGVAIDWGHGWGWGQTAWAAHTACVSETATALEAAVNSALHCHALGDYGVGSGMDELDCSAFGDFIF

SEQ ID NO: 8307 - protein, 486 aa, Fukomys damarensis
MSMKLTAILLLLQLSSYLGSGSCGKVLVWPMEYSHWINLKTILDVLVQKGHEVTVLRSSVSISLDVEKESAIKFETYPTSLCRDDWEYIFTDELRKLIYELPKESKWTYFSILQEIMWVDSSYMEITCKELVLNKELMSKLQEPSFDVLLADAFTPCGELIAELLHIPFVYTHRSFPGYTYEKYSGKLPFPPSYVPVALSELTDQMTFMERVKNMIYVLYFDFWFQAFNEKKWNQFYSEVLGRPTTLSEIMGKAEMWLIRTYWDLEFPRPSLPNFDFVGGLHCKPAKPLPKVIWRFDGKKPDTLGPNTQLYKWIPQNDLLGHPKTKVFVTHGGTNGIYEAIYHGVPMVGIPLFYDQADNIVHMKAKGAAIRLDFITMTRTDLLNALETVIDDPSYKENAMRLSRIHHDQPVKPLDRAVFWIEFVMRHGGAKHLRVAAHDLSWFQYHSLDVIGFLLACVATVIFIITKCCLFCYQKLAKTGKKKKRE

SEQ ID NO: 8308 - protein, 334 aa, Microtus ochrogaster
MSVKMTAALLLLQLSGFFGSGSAGKVLVWPMEYSHWLNLRTILDELVKKGHEVTVLIPSASLSYEVGDTSAIKFETYPSSTSLADVAAIFMESIRKCVYELPKQSFWGYFVLLQEVVWENSNYFESLCKDVVFNKELRKPTTLAETMGKADIWLIRTYWDLEFPHPVLPNFDFVGGLHCRPAKPLPKEIEDFVQSSGEHGVVVFSLGSTVGTLTEERANVIAAGLAQIPQKVLWRFEGKKPDTLGSNTRLYKWIPQNDLLGHPKTRAFITHGGTNGIYEAIYHGIPVVGIPLFGDQFDNVVHMKTKGAGVRMDFLTMSSTDLLHAVKTVTNDPS

SEQ ID NO: 8309 - protein, 446 aa, Loxodonta africana
MSMKWISVLLLIQLSCCFSCGTCGKVLVWPPEYSHWMNMKTIVDELIQRGHEVTVLTPSASVLIDPNKPSAIKFEVYPTSLTEDEFEYVFMKLVRRWTNEVPKDTFWTCFSVLQEILSEFSDFMERLCKDVVFNKKFMMKLQESRFDVILTDAVFPCGRPTTFSETRGKAEIWLVRNYWDFQFPRPFLPHFHFVGGLHCKPANPLPKEIEEFVQSSGKHGVVVFTLGSMVSNLTEERANMIASALAQIPQKVLWRFDGKRPDTLGPNTWLYKWIPQNDLLGHPKTKAFITHGGANGIYEAIYHGIPMVGIPLFADQPDNIAHMKVMGAAVRLNMDTMTSTDLFNALKTVIYDPSYKENAMRLSAIHRDQPVKPLDRAAFWIEFVMRHKGAKHLRPAALSLTWYQYHSLDVIGFLLACVAIVSFLVIKCCLLGYQKFYKTRKKKKRE

SEQ ID NO: 8310 - protein, 529 aa, Dipodomys ordii
MTWKWNSVLLILQLSYYFNSGSCGKVLVWPMEYSHWMNIKVILDELILRGHEVTVLRPSSAIFIKSNEVSSIKFETYPSSYTTEERITISTEMIRRWTYEMPRTCLAYSPLLENIMWKFSNIWLNICREAALNKEFIAQLQKGRFDIVIVDPIGACGELLADLLKVPFVYSIRSSPGYKIEKYSDGFLFPPSYVPVILSGLSGQMTFMERIENMLCMLYFDFWFEIFDLKKWNNLYSEVLGQPTTLMETMSKAEIWLIRSYWDLEFPRPTLPNVDFVGGLHCKPAKPLPKEMEDFVQSSGDNGVVVFSLGSMVGNITEETANEIASALAQVPQKVLWRFNGKKPDTLGPNTRLYKWLPQNDLLGHPKTKAFITHGGANSIYEAIHHGIPMVGIPLFGEQHDNIAHMVAKGAAVQLDIRAISSKDLLRALEAVINNPVYKKNAMWLSTIHQDQPMNPLDRAVFWIEFVMRHKGAKHLRPLSHNLTWYQYHSLDVIGFLLACVATVTFLVLKCCLFVYQKVLKKGKKEKSE

SEQ ID NO: 8311 - protein, 483 aa, Culex quinquefasciatus
MNQLAQHGHNITALSVNTDPNAVENITYIHLENTYNVLYGDGKANNNILKRSEENPFQATMSFYKFGTLGCIGATSSAGLQRLMEYPDDFPFDLVIYDFTCGPCVLGFLQKFNYPPLVSLTGFSIPQFSHHLVGGHKPSSYVPHFSLRYDTKMDFFQRMINFIVQNFDSIYREWVFLPHMQRLAQTAFNFTLPNLAELEQRTQIMLVNTNPVLDPPETLPQHVIPVGGLQIVQPKPLVEEISNFIESSSKGTVLFAMGTNFKSKMFTRDRQAMFIEAFALLPEYNFLWKFDDDNLPIPAPKNLMVRAWLPQNDILAHPRLKAFITHCGLLSTYEASYHGVPTIGIPIYVDQHRNAQRSARAEVGVTLDLKNLSTEAIRRALLRVLTGEKFATNMAKRAQLLRDQTESPLDRAVWWIEWVLRHPHSNHMRSPMLDLGYFAKGNIDVFVFLCLFLAIVLTVILKCIKNLIKKSHQTDCDKKEKLK

SEQ ID NO: 8312 - protein, 300 aa, Sus scrofa
MVGPASSTDKNGKPTTLCEVMGKAEMWLIRTYWDFEFPHPYLPNFEFVGGLQCKPAKQLPQELEEFVQSSGRDGVVVFTLGSMVKNLTEEKSNMVASALAQIPQKVLWRYKGKKPETLGANTRLYEWIPQNDLLGHPQTRAFITHCGTNGIYEAIYHGVPVVGIPLFGDQFDNIARVQAKGAAVQLDLNTMTSSDLLKALRTVINNSSYKENAMKLSRIHHDQPVKPLDRAVFWIEFVMNHKGARHLRPAVHDLTWYQYHSLDVIGFLLACVAVVVFLVTKCCLFCCWKFGKISTKRKRE

SEQ ID NO: 8313 - protein, 444 aa, Bos mutus
MAMKRLLLLLLLQLTCYFSSGSCGKVLVWPVEYSHWMNMKIILDELVMRGHEVTVLTSSASILIDPNKPSAIKFENFSVSLTKDDFEDALKNFVGNWTDLTNSFWTFPLLLQSLFDEYSDLTLKICKELISNKKFMTKLHESRFDVVLADTVGPCGEPTTLLETMGKAEFWLFRSYWDFEYPCPLLPNVEFIGGLHCKPAKPLPKEMEEFVQSSGENGIVVFTLGSMVTNVTEERANMIASALAQIPQKVLWRYDGKKPDTLGPNTRLYKWVPQNDLLGHPKTKAFITHGGTNGIYEAIYHGVPMVGLPLFAEQPDNINRVKAKGAAVRLNLETMSKTDFLNALKQVINNPSYKRNAMWLSTIQRDQPMKPLDRAVFWIEFVMRHKGAKYLRPAAHKLTWFQYHSLDVIGFLLACVATAVFVITKCFLFCCRKFAETGKKRKRE

SEQ ID NO: 8314 - protein, 275 aa, Heterocephalus glaber
MWLIRSYWDLEFPHPSLPNFDFVGGLHCKPAKPLPKEMEDFVQSSGEHGVVVFSLGSMVSNMTTERANMIASALAQIPQKVLWRFDGKKPDTLGPNTRLYKWLPQNDLLGHPNTRAFVTHGGANGIYEAIYHGIPMVGIPLFAEQHDNIAHMKAKGAAVKVEFITLSSTELLNALDTVLNNTSYKENAMWLSTIHHDQPVKPLDRAVFWIEFVMRHKGAKHLRPLAQNLTWYQYHSLDVIGFLLACVATVTFLVIKSCLFCSQKFVKKGKKQKRE

SEQ ID NO: 8315 - protein, 529 aa, Mus musculus
MPVKWISALLLLQMSCCFRSTSCGKVLVWPLEFSHWMNLKIILDELVQRGHEVTVLRPSASIFVDPKYSPGLKFETFPTAFSKDYLETFLTKLVDEWTFEVPRDTCLSYSLLQTLFGKLSDYSLSLCKEAVSNKQLMTKFQESKFDVLILDAMASCGELIAQLLQIPFLYSLRFSPGYQVEKNSGGFVLPPSYVPVILSGLGGQMTFTERVKNMICMLYFDFWFQTFTEKEWDQFYSETLGRPTTLIETMGKAEMWFIRSYWDLEFPHPTLPNVEYVGGLHCKPAKPLPKEMEDFVQSSGVHGVVVFSLGSMVSNMTEERANAISWALAQIPQKVLWRFDGKTPASLGPNTRIYKWLPQNDLLGHPKTKAFVTHGGANGLYEAIHHGIPMIGIPLFSEQHDNIAHMVAKGTAVALNIRTMSRSDLLNALEEVINNPSYKENVMWLSTIHHDQPMKPLNRTIFWIEFVMRHKGAKHLRPLAHNLTWYQYHSLDVIGFLLVCVVATAVLPVKCCLFVYQFFVKKAKKRKNE

SEQ ID NO: 8316 - protein, 279 aa, Poecilia mexicana
LIVAILSLFLQYFQALVNDTAEHGFVVVSFGAGVKYLSQDIAHKLAGALARLPQRVIWRFSGVAPSNLGNNTKLVDWMPQNDLLGHPHTKAFLSHGGLNSIYEAMYHGVPVVGVPLFGDHYDTMTRVAAKGMGVMLHWKDMTEEDLYASLSSVINDPRYRQQARLLSNIHKDQPGHPVTRAVYWIGYILRHSGANHLRSAVYEVSPYQYFLVDVLLAVAAAGALIVFLLRRLVRLLRGKAGDHSRRVDGSMTNGHCHSESIANGKHKRNGSLKTEKKIN

SEQ ID NO: 8317 - protein, 530 aa, Unknown
  Description of Unknown: AHD78779.1 Sequence 27388 from patent US 8586006 sequence
MSLKWTSVFLLIQLSCYFSSGSCGKVLVWPTEYSHWINMKTILEELVQRGHEVTVLTSSASTLVNASKSSAIKLEVYPTSLTKNDLEDSLLKILDRWIYGVSKNTFWSYFSQLQELCWEYYDYSNKLCKDAVLNKKLMMKLQESKFDVILADALNPCGELLAELFNIPFLYSLRFSVGYTFEKNGGGFLFPPSYVPVVMSELSDQMIFMERIKNMIHMLYFDFWFQIYDLKKWDQFYSEVLGRPTTLFETMGKAEMWLIRTYWDFEFPRPFLPNVDFVGGLHCKPAKPLPKEMEEFVQSSGENGIVVFSLGSMISNMSEESANMIASALAQIPQKVLWRFDGKKPNTLGSNTRLYKWLPQNDLLGHPKTKAFITHGGTNGIYEAIYHGIPMVGIPLFADQHDNIAHMKAKGAALSVDIRTMSSRDLLNALKSVINDPVYKENVMKLSRIHHDQPMKPLDRAVFWIEFVMRHKGAKHLRVAAHNLTWIQYHSLDVIAFLLACVATVIFIITKFCLFCFRKLAKTGKKKKRD

SEQ ID NO: 8318 - protein, 533 aa, Buceros rhinoceros
MAAKAASSKKYLQLLLFPVTLLGPVFCGNVLVWPAEGSHWLNVQGVIRELIHRGHSVTILVHSSSLYIKPRADAAEKFEVYDVPFQTDTLRNMIDDAVALWVNNRPTILTFWQFYKELGKQSENWNQIARMICDAALTNQELMARLQRSNYDVVLSDPAALCGDLLALKLAIPFIYSLRFSPASTMERNCGKIPAPPSYVPAALSELSDRMSFSERVKNIVSYHVQEHIFQTFWGEWDVYYSKILGRPTTLCETMGKAEVWLIRTYWDFEFPRPFLPNFEFVGGLHCQPAKPLPKEMEEFVQSSGEHGIVVFSLGSMVHNLTDEKTNVIARALSQLPQKVLWRYKGKKPETLGSNTRIYDWIPQNDLLGHPLTKAFITHGGTNGIYEAIYHGIPMVGIPIFADQHDNIARMRAKGAAIGLDFITLKSQDLVDALNTVINNPSYKENALKLSKIQHDQPVKPLDRAVFWIEFVMRHKGAKHLRPAAHNLTWYQYHCLDVLAFLLTCTTIVVFILVKCCLFCCRRCGRIAKKKKE

SEQ ID NO: 8319 - protein, 412 aa, Carlito syrichta
MSMKWVSVPLLIQLSCYFSSGSCGKVLVWPTEYSHWLNMKTILDELVQRGHEVTVLASSISILVDPNKSSTIKFEVYPTSLTKNDYKNTITRVINLWTHAPKDSFWFQTFDMMKWDQFYSEVLGRPTTLLETMGKAEMWPIRTYWDFEYPRPLLPNFDFVGGLHCKPAKALSKEMEDFVQSSGENGIVVFSLGSMVSDMTEERVNVIASALAQIPQKVLWRFNGKKPDTLGPNTRLYKWIPQNDLLGHPKTKAFITHGGTNGIYEAIYHGIPMVGLPLFADQPDNMAHMKTKGVAISLDYHTMSSTDLLNAVKTVIHNPLYKENAMKLSEIQHDQPMKPLDRAAFWIEFVMRHKGAKHLRVAAHDLNWFQYYSLDVIGFLLACVATVIFTVTKCCLFFFQKFAKTERKGKKD

SEQ ID NO: 8320 - protein, 445 aa, Ochotona princeps
MSARWISVLLLLQLSCHFSAVGCGKVLVWPMDFSHWINMKTILDELVQRGHEVTVLKSSVSVLLDHNESSAIKYETFPVSTPKDVYEKAFSNDLMKHVYELHKYSFWNFLSKLQQIQYEISDFFQIICRDAVLNKELVTKLKESRFDVIFADTLCPCGRPTKLTELMGKAEMWLIRTYWDLEFPRPLLPNVDFVGGLHCRPAKPLPKELEDFIQSSGEEGIVLFSLGSMVSNLTEETANVIATALAQLPQKVLWRYSGKKPRTLGPNTQLHTWVPQNDLLGHPKTRAFITHGGTNGIYEAIHHGVPLVGIPLFADQFDNIAHVKAKGAAVKVDFITMSSADLLSAVKTVINDPSYKENAMTLSRIHHDHPMKPLDRAAFWIEHVMRHKGAKHLRVSAYDLTWYQYHSLDVIGFLLACVTTAALIIIKCCLFCYRMFVKSVKRKRE

SEQ ID NO: 8321 - protein, 315 aa, Chinchilla lanigera
  MOD_RES (67)..(74): Any amino acid
MLHLLYFDFWFQTFNEKKWSQFYSEILGRPTTLSQSMAKAEMWLIRSYWDLEFPRPTLPNTEFVGGXXXXXXXXLSQEMEEFVQSSGEHGIVVFSLGSMIYNLTEERANVIASALAQLPQKVIWRYSGKTPDTLQANTQLHDWIPQNDLLGHPKTKAFVTHGGANGVYDAINHGVPMVGIPLFGEQHDNIAHMEAKGTAVALDFQTMSTTDLVNALKEVMNNPSFKENVMRLSTIHHDQPVKPLDRAIFWIEFVMHHKGAKHLRPLAQNLTWYQYHSLDVIGFLLACVVTVTLLVTKCCLFCYQKIVRIGKKKKE

SEQ ID NO: 8322 - protein, 531 aa, Oryctolagus cuniculus
MSVKSVSVLLLLLQLSCCFSSGSCGKVLVWPMEFSHWMNMKVILDELVQKGHEITVLRSSASVLIDHKKQSGIKFETFPTTSTQEELDVFFTNWVNILINDVSREKYWEYFPLWQKFFLQYSEIYENFCKDLVLNKKLMTKLQESKFDVVFADAIAPCGELLAEFLKIPLVYSLRFTPGYTYEKYSGGLLFPPSYVPAITSVISGQMTFTERVKNVLWMLYFDFWFQTFNVKRWDQFYSEVLGRPVSFYELVGKADIWLIRSYWDLEFPRPLLPNFEFVGGLQCKPAKPLPKEMEAFVQSSGEEGVVVFSLGSMVSNMTEERTTVIASALAQLPQKVLWRFDGKEPDTLGPNTKLYKWMPQNDLLGHPKTKAFITHGGSNGIYEAIYHGIPMVGLPLFSEQPDNIAYMAAKGAAVRLDWKTMSSTDFLNALKTVINDPSYKESIMKLSRIHHDQPMKPLDRAVFWIEYVMRHKGAKHLRIAAHDLTWYQYHSLDVIGFLLACVTIITYLVIKCCLFVYQKLAMTGKKKKKD

SEQ ID NO: 8323 - protein, 536 aa, Capitella teleta
MVDGVYNEAVEDIRSSRTDNMLRFVLLFCLMLASGNGSKILLLPTPFTGHLNYFVPLGKALVDEGHEVHIILSTGSKGVDLIQKQGIKVMQYLAEDGICHLVTDSFYKNVSLGMLENPDPRLLAGIVAPAVAKECEFFLKDDSVLKQAKKVNFDLAVVDGLFFARCLYLFPVKLEIPYVTLTTFQEFWMMKVPAMPSHVPFHYLGFTQKMTFPQRMINTLVNIVWVLGSGKSPELPDVVKDRYSDVIARVDFDSLILKSKLWFFNSDISLDYPKPSMPNVVNIGGMSPKPAKPLEEELMKWMDGSTNGVVVASFGSVISYIPLELSNKLLKAFAELPYNVLWRNKNITGLTVPDNVRVMSWLPQNDVLGHPNTVAFVTHCGNNGQFEALYHKVPMIGLPVFADQPYNGLRMEQKGFGINMDIRTFKPEELTHNILRVATEPSFRTNIAKGSGIFKSRQSRLAATVAFWLEHVVEHGGDHLRSHAMDMPAYQYLLLDVFAVFFLVTLFVLAMILFLCRGIFRMFAQVRQGSEKEKNE

SEQ ID NO: 8324 - protein, 445 aa, Ochotona princeps
MSLKHVSVLLLLLQLSCCFRSGSCGKVLVWPMEYSHWMNLNAILDELVRRGHELIVLNHNASIFVDSGKTTTIKFETFPIDITKNDLEMFYMQVINTWTNALQDSYWEYLPALQKIFSEYSDICKDICKAAVLNKKLMTKLQRSKFDILLSDPIGPCGRPVTFYELVAKADMWLIRSYWDLEFPRPTLPNVHFVGGLHCKPAKPLPKDMEDFVQSSGEEGVVVFSLGSMVSNMTEERANVIASALAQLPQKILWRFDGKKPETLGPNTQVYKWIPQNDLLGHPKTRAFVTHGGANGIYEAIYHGVPMVGLPLFGDQPDNIAHMTSKGAAVRLNWKTMSSADLLNALRTVIHDPSYKENVMMLSRIHHDQPMKPLDKAVFWIEHVMRHKGAKHLRVAAHDLTWYQYHSLDVIGFLLVCVIIIAYLVIKICLFVYQKLVKTEKKKSD

SEQ ID NO: 8325 - protein, 532 aa, Bubalus bubalis
MNKMSMKWLLLLQLLQLTFYFSSGSCGKVLVWPVEFSHWMNMKTILDELVTRGHEVTVLQSSASTLIDPNKPLAMKFETFPVSLAKDDFQTLAKILIETWMLVVKDFFWIHLSTMQSLLDEFSDIGIKICKEVVSNKKLMTKLQESRFDVVLADAVGPCGELLAEILKVPLVYSLYFSPGYLVEKRSARLSFPPSYVPVMLSELSDHMTFMERVKNMIYVLYFDYWFQLYNEKKWNQFYSEVLGRPTTIAESMGKAEMWLIRNYWDFSFPRPGLPNVEFVGGLHCKPAKPLPKEMEEFVQSSGEHGIVVFSLGSMVSNMSEERANVIASALAQIPQKVLWRYDGKKPDTLGPNTRLYKWIPQNDLLGHPKTKAFITHGGSNGIYEAIYHGIPMVGLPLFADQPHNIVHMTAKGAAIRLDLETMSTADLLNALKEVINNPFYKENIMRLSAIQHDQPMKPLDRAVFWIEFVMRHKGAKHLRPASHNLTWFQYHSLDVIGFLLACVATVVFVITKCCLFCCRKFANIGKKGKRD

SEQ ID NO: 8326 - protein, 529 aa, Bos taurus
MKTVKVFCILFMLHLCLFDSGMTGKVLVWPADFSHWINLQVILEELHHRGHEITVLIPSPSLLIDHTKVPYNVEILQLSVTKETSMEEMNTILYEASFDMSKFSWWKMQIKLANIGRKFLLITKRVCDSAVTNKELLNRLQAAKFDVCIADPLRFCGELVAELLNIPFIFTFRLLYGNVIERLCAGLPMPSSYIPCITSRLTDNMTFIQRLENWLLYTVNDVIYSYYVFPEWDEYYSKVLGKPTTLCEIMGKADMWLFRSYWDFEFPQPYLPNTEFVGGLHCKPAKPLPKEFEEFVQSSGKDGVVVFTLGSMIKNLSEEKSNMIASALAQIPQKVLWQYTGKKPETLGANTRLYKWIPQNDLLGHPKTRAFITHCGTNGVYEAIYHGVPMVGIPLFADQYDNVVRMQAKGAAVEVDLQRMTSADLLNALKEVINNPFYKENAMKLSRIHHDQPVKPLDRAVFWVEFVMHHKGAKHLRPAFHDLNWFQYHSLDVIGFLLACVATVAFLVTKCCLFCYWKFGKTAKKKKIE

SEQ ID NO: 8327 - protein, 952 aa, Blattella germanica
HFSISFPRPLTPNVVQVGGLHVKPPKKLPLVTHPNVKLFITHGGLLSTQETIDRGVPVIGIPIYGDQYMNMANTVSLGIGVKLELSNISMDSVLWAINEILDNPSIFASHLSLLIWICLVSCLHLGEGARILGIFPIPSKSHWAVNQALIQELAKRGHKLTVLTPFPEKSQPNYKEIVIQANREDVLNNTVSLMVWNMGNLVTDQMLQLGAVQDLIHSDQEFDLIISEGFFTDGFLGFVHKFKAPLIQTISFGGFHWMHDWVGNTSPYAYIPNTFLGFSDKMNFWERLQNTFTLTFEKVTRRIMFVPEQQKIMEKHFGKFGPLPSIDDIHASTSLMFLNNHFSTSYPRPLLPNIIEVGGMHIKPPKKLPEDLQKYLDDAPDGVVYFSLGSHFYSSDMPDWKVNSFLKAFSKLKQKVLWKWEKDTLPGQPKNVKLGKWLPQSDILAHPNVKLFMTHGGLLSTQETIYRGVPILGIPLTADQKMNTYVIRHKGAPHMRSAALDLTWYQYFLLDVFAALVLAVGIVLSITFLLVRAVYRKCCRRSKIKNRRGHELTVITPFPEKSPPPNYRDIVVQASRDDFLNETGHTNSLTMVDFNLIQMVLMMWGIGNSVSDQLLQQEAIQELINSDQQFDLILIEGFFNDAFLGFVHKFKVPFIQIITFGGLHWMHDWVGNTSPYAYVPEAFLGFSDKMNFCERLQNTLMITFEKVTRRIMFIPEQQRLIEKYFGQFGPPPSVDDIHASTSLVFLNNHFSTSYPRPLLPNIVEVGGMHIKPPKKLPEDLQKYLDDAPDGVIYFSLGSNFYSSDMPDWKINAFLEVFSKLEQKVLWKWEKDTLPGQPKNVKLGKWLPQSDILGGYRENAKRTSKIYQDQPLTPLETAVFWTEYVIRHKGAPHMHSAALDLSWYQYFLLDVIAVLFLAVGIVASIMFILIRAVYRKCCGKSKIKKRVSSKKTN

SEQ ID NO: 8328 - protein, 283 aa, Dipodomys ordii
METMSKAEIWLIRSYWDLEFPRPTLPNVDFVGGLHCKPAKPLPKEMEDFVQSSGDNGVVVFSLGSMVGNITEETANEIASALAQVPQKVLWRFNGKKPDTLGPNTRLYKWLPQNDLLGHPKTKAFITHGGANSIYEAIHHGIPMVGIPLFGEQHDNIAHMVAKGAAVQLDIRAISSKDLLRALEAVINNPVYKKNAMWLSTIHQDQPMNPLDRAVFWIEFVMRHKGAKHLRPLSHNLTWYQYHSLDVIGFLLACVATVTFLVLKCCLFVYQKVLKKGKKEKSE

SEQ ID NO: 8329 - protein, 485 aa, Bison bison
MKIVKGFCILFMLHLCLLDSGRTGKVLVWPVDFSHWINLQFILEELHLRGHEITVLVPSQNLLIDHTKVPYHVEILQLSVTEETFMEEFNSMLYEEIFELPKLSWWEMQIKLADLVRKFLLTNKRVCDSAITNKELLSRLQAAKFDVCIADPLSFCGELVAELLNIPFIFTFRFFYGNAIERLCAGLPMPSSYVPGVTSRLTDKMTFIQRLQNWLLYTVSDMIYSYYIFPEWDEYYSKVLGKPTTLCEIMGKADMWLFRSYWDFEFPQPYLPNTEFVGGLHCKPAKPLPKVLWRYTGKKPETLGANTRLYKWIPQNDLLGHPQTRAFITHCGTNGIYEAIYHGVPMVGIPMFGDQHDNLARMKAKEAAVEVDLQRMTSADLLNALKAVINNTSYKENAMKLSRIHHDQPVKPLDRAVFWVEFVMRHKGAKHLRPASHDLNWFQYHSLDVIGFLLACVATVAFLVTKCCLFCCWKFGKTAKKKKRE

SEQ ID NO: 8330 - protein, 529 aa, Ceratotherium simum
MSMKWISVLLLLQLSCYFSPGSGGKVLVWPTEYSHWINMKIILDELVQRGHEVSVLTSSASILVDPSKPSAIKYEIYPTSLTKHDFEVLLRKLFDKWTYLPKDTFWTYFSQLQELLWEYFDCIEKLCKDVVLNKKLITKLQESRFDLLLADAVGPCGELLAELLKIPLVYSLRYIPGHKIEKYSGGLPFPPSYVPVISSELSDQMTFMERVKNMIYVLYFDFWFQTLNEKRWDQFYTEVLGRSTTLSELMGKAELWLIRTYWDFEFPRPLLPHFEFVGGLHCKPAKPLPKEMEEFAQSSGENGIVVFTLGSIVSNMTEERANVIASALAQIPQKVIWRLDGKKPDTLGPNTRVYKWIPQNDLLGHLKTKAFITHGGTNGIYEAIYHGIPMVGIPFFADQPDNIVHMKTKGAAVRLDFHTMSSTDLLNALKTVINDPSYKENAVKLSRIHHDQPVKPLDRAVFWIEFVMRHNGAKHLRPASHDLTWFQYHSLDVIGFLLACVATAVFVLAKCCLYCCRKFAKTGKKEKRE

SEQ ID NO: 8331 - protein, 531 aa, Mesocricetus auratus
MPAQWKSLLLLLLQITCYFRSANCGRVLVWPMEYSHWLNLKIILDELTERGHEVTVLRPSASIFLDPEKSPNLKFESFPSTLSKDDLDKSFLRLVNVWIYELPSDICLSYSPLLENLFQDISDSYLSLCKDTVSNKQLMTKLQKSKFDVIVSDAVAPCGELIAELLHIPFLYSLRFSPGYKVEKSSGGFIFPPSYVPIILSGLGGQMTFMERVRNMICMLYFDFWFQPLNEKKWDQFYSETLGRHTTLAETSGKAEMWLIRSYWDLDFPRPTLPNVDFVGGLHCKPAKPLPKEMEDFVQSSGEHGVVVFSLGSMVSNMTEAKANTIAWALAQIPQKVLWRFDGKTPDTLGSNTRVYKWLPQNDILGHPKTKAFVTHGGANGIYEAIHFGIPMIGIPLFGEQHDNIAYMVAKGAAVALNFRTMTRLDLLNALEAVIDNPFYKENAMWLSTIHNDQPMKPLDRAVFWIEFVMRHKGAKHLRPLAYNLTGYQYYSLDVIGFLVACVAVIAFLVIKSCLFIYQKFVKMGKKMKND

SEQ ID NO: 8332 - protein, 412 aa, Mandrillus leucophaeus
MSLKWTSVFLLLQLSCYFSSGSCGKVLVWPTEYSHWINMKTILEELVRRGHEVTVLTSSASTFVNDSKSSAIKFEVYPTSLTKNDMEDSLMKLIKNMIHKLYFDFWFQIHDIKKWDQFYSEVLGRPTTLFETMRKAEMWLIRTYWDFEFPRPFLPNVDFVGGLHCKPAKPLPKEMEEFVQSSGENGVVVFSLGSMISNLSEERANMIASALAQIPQKVLWKFDGKKPNTLGSNTRLYKWLPQNDLLGHPKTKAFITHGGTNGIYEAIYHGIPMVGIPLFADQHDNIVHMKVKGAALSVDIRTMSSRDLLNALKSVINEPIYKENAMRLSRIHHDQPMKPLDRAVFWIEFVMRHKGAKHLRVAAHNLTWIQYHSLDVIAFLLACVATVIFIITKCCLFCFRKLAKTGKKKKWD

SEQ ID NO: 8333 - protein, 529 aa, Mesocricetus auratus
MPVKWMSVLLMLQMSCYFRSGNCGKVLVWPMGHSHWMNLKIILDELAQRGHEVTVLRPSSSIFFDPKKSSGLIYETFPTASNNDEVEKFVSQWVNMWIYDVPKDTCWRYYPSMNIMFGKFSDLWLKFCREVVTNKQVMAKLKESKFDVVLSDAISPCGELIAELLQIPFVYSLRFGNGYGIEKYSAGLIFPPSYVPIVLSGLSGQMSFMERVENMVCLLYFDFLYESFPAKDWDPFFSEILGRPTTMADTMKKAEMWLIRSYWDLEFPRPSLPNIEFVGGLHCKPAKPLPEEMEEFAQSSGEHGVVVFSLGSMIRNITQERANTIASALAQIPQKVFWKFEGKKPDTLGANTRIFNWMPQNDLLGHPKTKAFVTHGGANGIYESIHHGIPMVGIPLFAEQHDNIAHMVAKGAAVSLDFHTLKSSDLLNALKAVINNPSYKKNVMWLSTIHHDQPMKPLDRAVFWIEFVMRHKGAKHLKPLAYNLTWYQYHSLDVIGFLLACVAAIAFFTIKCCLFVYRFFVKERKDKRD

SEQ ID NO: 8334 - protein, 417 aa, Colobus angolensis
MSMKWTSALLLIQLSCYLSSGSCGKVLVWPTEFSHWMNIKTILDELVHRGHEVTVLAYSTSILPGPNNPSALKFEICPTSLTETEFENDVTQLVKRWLDVQNMMYMVYFDFWFQVWDVKNWDQFYSEVLGRPTTVFETMAKAEIWLIRNYWDFQFPHPLLPNVEFVGGLHCKPAKPLPKEMEEFVQSSGENGIVVFSLGSMVSNMSEERANLIASALAKIPQKVLWRFDGNKPDALGLNTQLHKWLPQNDLLGHPKTRAFITHGGANGIYEAIYHGIPMVGIPLFADQPDNIAHMKAKGAAVSLDFDTMSSTDLLNALKTVINDPLYKENAMKLSSIHHDQPVTPLDRAVFWIEFVMRHKGAKHLWPAAHDLTWFQYHSLDVVGFLLACVAAVIFIITKCLVCVWKFVRTVEKGKRD

SEQ ID NO: 8335 - protein, 1053 aa, Drosophila virilis
MLRLMVWLGLGISAALCPSSVDSAQILGLFGHPGKSHFDFFRPMFVALAERGHNVSMYSYFPLKQPMANYTDYVFEGMPLLTDFVDLQTFERQSDRLLGQPFKVPTFFMLHDWGLRSCRVALNSPLIAQLLSSPQRYDVIILEHFSNDCLAAVAHLLDAPVIALSSCAIMPWHYKRMGTPFINPIMPMNFLTYTDQMSFVERLNNFFHFHIVNMLYNFITQPATDAMISQRFGFGLPPINEIVKNTSLMLINQHHALTGSRPYAANVVEVGGLQVGPAKPLPLHLERLFDASNLGVIYISWGSMVNPSTLPAGKLQALFDTISQLPGYTFVMRWTNQTLAENKPSNLHTYEWLPQRDLLCHPKVKAFLSHGGLLGTTESIYCAVPMLVTPFYGDQFLNAGAVVQRRFGVIVDFADFDEPHLTQALRTILQEGFAAEMKRSTLEFRERPLEPLKLAIWWIEHVIATSGAPLSQSVARHINWFVYNSIDVYVCCLTIALLGLAGVWKFCKLLKWAWGRRTTPKTKQPQLASFRHSFEIMLLLRPLLAALLTLLCVQVDAGRPLKVLGLFPHPGVSHFHFFQPIMHALAEAGHDVSVVSHFPAKNPPIRYKDFPLTGTEKLTNSVDLKFFEKRPFYNHFIEFFLLHEWGKEACNLTLRSEALQTVLKRKAGYYDVIVLEQFNTDCMMGVAHQLQAPVVALSSCAMMPWHYERMGVPIIPSYIPALFMGQSQDMNFGGRLANWFSFHTLNWLYKLVSIPAADALVQYKFGHDVPSVGELVKNTSVYFVNQHYSLSGPKPLPPNVIELGGLHIQKANPLSAELQRLLDNAEHGVILISWGSMIRANSLSPEKRDGIVRAVARLKQQVIWKWENETLANMPPNMHIMKWLPQRDILCHPNVKVFMTHAGLMGSSEAAYCGVPVVATPMYGDQFLNAAALVQRNMGVLLHYEDIGENTVLKALKRALDKKHADAAKLVAHSFKYRPQQALQTALWWVEHVGHTGGNPLLKSSAVELSRFVYYSLDCYVAVGLILAIVIASWVALIGRCRAKRPEQKNKRD

SEQ ID NO: 8336 - protein, 397 aa, Ochotona princeps
MCVKRVSIWLLLLQLSSCFSSGSCGKVLVWPMEFSHWLNLKIILGELVQRGHEVTVLRSSASVSIDPKNESGIKFETFPTSSTKEEMGTFFMYWINTLINDVPRDNYLEYYPLWNKFFLEFSDIYESLCKEVVFNKKLIAKLQASKFDIVVSDPFAPCGELLAELLEIPLVYSLRFTPGYTYEKYSGGLLCPPSYVPVIMSVLSGKMTFMERVKNMLFMLYFDFWFQTFNEKRWDQLCSEALGRPVTFSELMGKADMWLIRSYWDLEFPRPLLPNVEFVGGLHCKPAKPLPKDMEDFVQSSGEEGVVVFSLGSMISNMTEERANVIASALAQLPQKVLWRFDGKKPDTLGSNTQVYKWIPQNDLLGHPKTKAFVTHGGANGIYEAIYHGIPMQFYWQ

SEQ ID NO: 8337 - protein, 423 aa, Capitella teleta
MLENPDPGILTGIVAPAVTKECELFLKDDSLLKQAKEVNFDLAVVDGLFFARCLYLFPVKLGIPYVTITTFQEFWMMKVPAMPSHVPFHYLGFTQKMTFMQRMINTLVNIAWVVGSHKFSELPGVIKDRYSDVIAREDFDSLILKSKLWFFNSDISIDYPKPSMPNVINIGGMSPKPAKALEEDLGKWMDESTNGVIFASFGSVISHIPLELSNKLLTAFAQLPYNVLWRNKNITGLTIPDNVRPMSWVPQNDVLGHPNTVAFITHCGNSGQFEALYHMVPMIGMPVFADQPYNSLRMEQKGFGIHMDLRTFKPEELTQNIIRVVTEPSFRTNITKGSGIFKSRQRKLKDIITFWVEHVIEHGADHLRSYAMDMPAYQYLLLDVFAVLFLVAFLMFAIILLLCRVACKKISQLFQGDKKEKNE

SEQ ID NO: 8338 - protein, 446 aa, Alligator sinensis
MLARWFPLLLCVQMCFWDSGSCGKVLVWPTDASHWINLKMILGELILRGHDVTVLVPSATLLIDYDDPTSPFDFEVLKVPFTKETVKTVLQDFLSLCLYEKPHLSHWEALVKIRQMMTTFTKMSKQTCDGFVLNPKLITKLRHGGFDVLISDPLAPGGRPTTLCETMGKAEMWLIRTYWDFEFPRPYLPNFEFVGGLHCQPAKPLPEEMEEFVQSSGEHGIVVFSLGSMIHNLTDEKNNMIATALSQLPQKVLWRYKGKKPETLGTNTRIYDWIPQNDLLGHAKTKAFITHGGTNGIYEAIYHGVPMVGIPIFADQPDNIAHMRAKGMAVELDFNTMKAQDLVDAVNMVVNNFTYKENAIRLSQIHHDQLVKPLDRAVFWIEFVMRHKGAKHLRPAAHQLTWYQYHCLDVLAFLLTCATVTLFIAVKCCLFCCKKCGRIVRKRKTE

SEQ ID NO: 8339 - protein, 542 aa, Callorhinchus milii
MQRAMKLYFQILTLLWCSVEISKAAKIVVVPPIMFESHLYIFKTLAKALHEQGHETVFAVSEGREIPSSDYFRLLRYPGFFNSTTADEFLQSKMRNIFSGRLTALELFDILEHYSKNCDLMVGSQGFITQLKEEKFDLVLVDPNEMCGFVIGHLLEVKYAVFSTGLWYPAEVGAPTPLAYVPEFNSLLTDKMNLFQRITNTAVYLLSRFGVNFLFLPKYERIMQKYNIEPERSMYELIQGASLWMLCTDVALEFPRPTLPNVVYVGGILTKPASPLPEDFMTWADDAEEEGFVLVSFGAGVKYLSDDVAHKLAGALARLPQKVVWRYSGKKPSNLGNNTRLVEWMPQNDLLGHSNIKGFLSHGGLNGIFEAMYHGVPVVGIPLFGDHYDTMTRVHAKGMGISLNWKTMTEDDLYNAMVTVIKDPRYKQRAEQMSQIHRDQPGHPVSRTVYWINYILRYSGAEHLRAAVYNIRFYQYFLLDAALLVSLSVVVTYKIGLWIVKLISKRFSSKVLQGKTNGHCYNGIANGKHRKNGHVKHEKKVK

SEQ ID NO: 8340 - protein, 484 aa, Colobus angolensis
MLNNILLFSVQISLIGITLGGNVLIWPMEGSHCLNVKIIIDELIEKEHNVTLLVASGSLFITPTSNLSLTFEIYKVPSGHLRLEELIQDFVLAELLNRPSKNTFWLYFSEMQEITWRFGDIIRNFCKDVVSNKKLMKKLQESRFDVVFADPTFPCSELLAELFNIPLVYSLRFIPGYVFEKHCGGFLFPPSYVPAFMSELSDQMTFMERVKNMIYMLYFDFCYQMHDMKKWDQFYSEVLGRPTTLCETMGKADIWLIRNSWNFQFPHPLLPNVDFVGGLHCKPVKPLPKVLWRFDGNKPDTLGLNTRLYKWIPQNDLLGHPKTRAFITHGGANGIYEAIYHGVPMVGIPLFADQPDNIAHMKARGAAVQLDFDTMSSTDLANALKTVINDPLYKENVMKLSRIQHDQPVKPLDRAVFWIEFVMRHKGAKHLRVAAHDLTWFQYHSLDVIGFLLACVATVIFIIMKCCLFCFWKFTRKGKKGKSD

SEQ ID NO: 8341 - protein, 528 aa, Ceratotherium simum
MVSEKWALAVLLLQLCCTGCGYCGKVLVWPCDMSHWLNVKTILEELTERGHEVTVLTPPYTNLIDYKKSSPLNFEVFHLPYDKESAENLNNKFLDLIFNVLPNLTPWQSAIKLKDYFAEITESLKIMCESVVYNQTLMKKLQESNYNVMIIEPVIPCGELVAELLAVPFVLTLRDSIGGMREKHCGKLPAPSSYVPVHMVGLTDRMTFMERVKNTMLSVFFDFWIQDYDTDIWDQFYSEALGRPTTLCETLGRAEIWLIRTYWDFEFPRPYLPNFEFVGGLHCKAAKTLPKKIEEFVQNSDGIVVFSLGTMIQNLTEEKANLIASALAQIPQKVLWRYKGKKPATLGANTQLYDWIPQNDLLGHPKTKAFLTHGGINGIYEAIYHGVPMVGIPMFGDQHDNIIHMKAKGVAVELNMNTMTSADLLSALRTVINDPSYKENAMKLSRIHHDQPVKPLDRAVFWIEFVMRHKGAKHLRPTAHNLTWFQYHSLDVIGFLLACAATAVFLVTKCFLFFCRKLDKTGNKKKRE

SEQ ID NO: 8342 - protein, 530 aa, Otolemur garnettii
MAVKWTSALLLLQLSCCFSSGTCGKVLVWPMEFSHWMNIKTILDELVQRGHEVTVLASSASIIVDPRKTSAIKFEVYPTSLTKDGLESLFLRLVDEWIYDVPKDSFWSHFSKVEEIMWAYSDKYQKLCEDVVFNKKLMKKLQDAKFDVVLADAVGPGGELLAKILKTPLVFSLRYSPGYGLEKHSGGLPFPPSYVPVMLSELSDRMTFMERVKNMIYVLYFDFWFQTFNMKKWDQFYSDVLGRPATLYELMGEADIWLLRTYWDFEFPHPILPNVEFVGGLHCKPAKPLPKEMEDFVQSSGENGVVVFSLGSMVSNMKEERANVIAAALAQLPQKLLWRFDGKKPDTLGPNTRLYKRIPQNDLLGHPKTKVFVTHGGANGIYEAIYHGVPMVGIPLFADQPNNMAHMRAKGAAVTLDFTTMSSADLLSALKTVTNDPIYKENAVRLSKIHHDRPVKPLDRAVFWIEFVMRHRGAKHLRVAAHDLSWAQYHSLDVIGFLLACGAAVMFVLTKCCLLCYRKFAAQRKKGKQE

SEQ ID NO: 8343 - protein, 576 aa, Aquila chrysaetos
MSIVLCSDMPSCQAWISLLLAGSKVFAHWSSELLPARSDRSCTLTAEMMGPRFPWLLWAYACCWSAGFCGKVVVWPTDASHWINVKVLLEELVLRGHEVTVLVPSSNLLIDYQDTSSPFTFEVLQVPFTQKTLHAIMDDFLNFWMNEVSNLSLWKIMWRMKEDLEVFTNMSKQTCDTLVMNPQLIAKLQQAKFDVLVADPLSVGGELVAEILAIPFVYSFRFSDGNVVEKLCGGLPSPPSYVPASTRGLTDQMSFMERLQNFLFYFYMDLFFLKFWRDEWDGYYSNVLGRPTTLCETMGKAEIWLIRTYWDFEFPRPFLPNFEFVGGLHCQPAKPLPKEMEEFVQSSGKHGIVVFSLGSMVYNLTDEKSNVIARALSQLPQKVLWRYKGRKPETLGSNTRLYDWIPQNDLLGHPMTKAFNTHGGTNGIYEAIYHGIPMVGIPMFADQHDNIAHMRAKGAAVELDFSTLKTQDLVDALNTVINNSTYKENALRLSKIHHDQPVKPLDRAVFWIEFVMRHKGAKHLRPAAHHLTWYQYHCLDVLAFLFTSTAIAVFTLVKCCLFCCRTCSRIAKRKKE

SEQ ID NO: 8344 - protein, 543 aa, Clupea harengus
MKPFPAITTLLLLSFFNWSWAAKIVVVPPIMFESHLYIFKTLATALHAEGHDTVFLVSEGRDVPESEHYRFQRYPGIFNSSTADDFLQSKVRNIFSGRLTALELFDILDHYSQNCDAVVGSEAVMAQMKRENFDLLLVDPNEMCGFVLAHILGVPYAVFSTGLWYPAEVGAPAPLSYVPEFNSLLTDRMTFLQRVTNTAVYLVSRFGVQFLVLPKYDRIMKKHNIQPAVSMHELVQSSRLWMLCTDMALEFPRPTLPHVVYVGGILTKPPSPLPQEFDDWVKDTDKHGFVVVSFGAGVKYLSEDIAHKLAGALAQLPQKVIWRFSGVPPSNLGNNTKLVDWMPQNDLLGHKNTRAFLSHGGLNSIYEAMYHGVPVVGVPLFGDHYDTMTRVQAKGMGLMLEWKRMSEQDLHTAMLSIITDNRYRDRAHMLSNIHKDQPGHPVSRAVYWINYILRHNGAPHLQSSVYSISTYQYFLLDVVAVMATAMLLIGYCLYRTGRAIRARFWKGAESEMMAKENGHCHNGIPNGKLKRNGHIKSNDKKLK

SEQ ID NO: 8345 - protein, 393 aa, Aotus nancymaae
MVRNSKRYILVTFFKDAVSPCGELLAELLKIPFVYSLRFSLGYILEKHCGGFLLPPSYAPVVTSELSDQMTFMERVKNMIYVLYFRFWFQLFDMKKWDQLYSEVLRRPTTLFEIMGKAEIWLIRNYWDFQFPHPRLPNVEFVGGLHCKPAKSLPKEMEDFVQSSGENGIVVFSLGSMISNMTEERANVIASALAKIPQKVLWRFDGNKPDTLGHNTRLYKWIPQNDLLGHPKTKAFITHGGANGIYEAIYHGIPMVGVPMFADQPDNIAHMKVKGAAVGLDFDTMSSTDLLNALTTVINDPIYKENAMKLSRIHHDQPMKPLDRAVFWIEFVMRHKGAKHLRVAAHDLTWFQYHSLDVIGFLLACVTTVIFIITKCLFCVWKFVRTEEKGKKD

SEQ ID NO: 8346 - protein, 320 aa, Lissorhoptrus oryzophilus
TLLRILPSGFDKYTVVPINDAMVKKYLGSDIPSVSTLQKYLSMIFVNSNPFLTNVKPVPPSVITLGFMHIKPPKPLPQELQEVLNNSTQGFVYFSLGSNAGFGDFPESTRNEVIQALSELPYTVLIKWNLDTFPNLGKNIITKKWFPQQDILAHPNIKLFVTQGGQQSTEEAISRGVPLVGIPVLADQLPNIKMLVKHGVAVLVRPNELTFTSLSNAIKEVAENPKYRKKMQEIQRVAFDQPMTSVEKAVFWSEYVIRNKGAPYLRSFLADTPLYEYLMLDVLALLLSFLLIVVFIIYQLLRITKKMLTSPGSKMKHKSH

SEQ ID NO: 8347 - protein, 411 aa, Nomascus leucogenys
MSMKWTSALLLIQLSCYFSSGSCGKVLVWPTEFSHWMNIKTILDELVQRGHEVTVLASSASISFDPNSPSTLKFEVYPISLTKTEFEDIIKQLVKRWADLPKDTFWFQMFDMKKWDQFYSEVLGRPTTLSETMAKAEIWLIRNYWDFQFPHPVLPNVEFVGGLHCKPAKPLPKEMEEFVQSSGENGIVVFSLGSMVSNTSEERANVIASALAKIPQKVLWRFDGNKPDTLGPNTRLYKWIPQNDLLGHPKTRAFITHGGANGVYEAIYHGIPMVGVPLFADQPDNIAHMKAKGAAVSLDFNTMSSTDLLNALKTVINDPLYKENAMKLSRIHHDQPVKPLDRAVFWIEFVMRHKGAKHLRVAAHDLTWFQYHSLDVIGFLLTCVATVIFIITKCLFCVWKFVRTGKKGKRD

SEQ ID NO: 8348 - protein, 525 aa, Spodoptera litura
MLGILKLGFVLTLATFCETANILYAIPYSVKSHYIMQRPVGLELARRGHNVTVITAHREIDHPPNYHQVIVVNKTIWDVLGRERPNLFTLVEYSAEQLHKEILWKGGLALTEGSLKSAEVQSLLAENRTFDLVISELFFQEATYALAHKYNAPLILISTMVNCMKHSLLTGNPLELATTSFEFLDASNPTSFWGRLRNLYLNVYDYFWWRYWFLEKQEELVRKYIPNLPQPVPSLYDLEKNASLLFLNSHFSFQSPVAFLPNIIEIGGIHLKESDSQLPADLQKLLDEATEGVVYVNFGSNVRSTELPIEKKNALINVFKRLNQTVLWKWEAESLDEKPDNVVVRKWMPQKEILSHPNIKVFLSHGGLIGTLEAVFHGVPIIGIPVYGDQYKNLIKAEEAGTGTTLLYHDINEENLERILHEFLKDDSYLKRAKELSRRFKDRPMSPLDTAMYWIEYVIRNKGADHIKSPSLKMNWITYNMLDVYGFIVIIFSLCSYVIYKIWELVSQCKFLVRIGFGHRKLKCL

SEQ ID NO: 8349 - protein, 1011 aa, Ctenocephalides felis
MAMASPSHHIWNKAIMQTLASNGHNVTALSIDTDETSGPNIHYLKINGVYESLYSGDEPFDLLEFSKKSLIGITVDTAKWFLTVCRASLRSEGVQRLLEYPKDFKFDLVIFDYTNLPCLHGFVSRFNSPPQIGITAFANPPHTSDLVGSPNFVSLKPHYTTTMGSTMSFLERLYNSLLYSVELVQRRMLIWWVRNEVREVFGDDELDVGALEKEVELVMVNSHPGMDVPEPVLPNVIQVGGLQIKEPKALPEDLKRFLESSKKGSVLFSLGTNMKSEIIGEEKISMFINAISRFPEYNFLWKIELENRTFPKNLMVRKWLPQNNVLAHPNIKLFITHGGLLSSQESTWHGVPIIGMPFFVDQHTNVQKSVDAGVGEKLDFFQLTEEIVYQKIKMILENTSYRQKMALRSSRFRDRPMHPLQEATWWCEYVLRHNGAPHLKSLAAVMEAPALFMWDLMLVWLGIFLGVAFLVVFGLRKIFRRKEVTNIRRKEFEEKKIVKKSETKFKGNILCLMTIASPSHHIWNRSLMEALAAKGYNITALSVDIDKEPAANLHYILIEDVYKAIYEEENFDLIAYASLDIYSSISDLMKYFAISNRAILRSQGLQTLLRYPDDFHFDLVVYDYSSFPSILGILQKFHNPPVVGVSAFMNPPNTYDASGNPIFASLKPYYATTFTPVMNFWERSVNLFYYVVDNWARKKDVEDAQELMEKVFGKSAGNARELERRIELFLVNVHPSIDVPEPLLPNVIPVGGLQVKQPKEAPQDIKRFIESSKKGAVLFSLGSNVKSEMLGEERIRMFIKAFAKFPDYHFLWKFSNKEKLNLPKNVLLQDWMPQNDILGHPKTVLFMTHGGLLSTQESHWHGVPMLGIPFFADQHTNMKRSIDAGVAEKLDIFNLSEEAIIAKLSRMLSEPSYQEKMTIRSTLFRDRPQHPLQEAVWWCEYVLRHKGAPHLKSQAVSMCPFALFMWDLLLVWLGVFLGALFLVFYGIKKICCGKEKDLKASEVLRKVKKTN

SEQ ID NO: 8350 - protein, 528 aa, Aotus nancymaae
MSMKWTSVLLLIQLSCYFSSGSCGKVLVWPTEFSHWMNIKTILYELVQRGHEVTVLAYSPSFLFDSNNSSALKFEVCSTSLAETEFVDNIIHLIERWSEIPKDTFWSHFSKLQEIMWTYSDLIRTFCKDVVSNKKLMTKLQDSRFDVVLADAVSPCGELLAELLKIPFVYSLRFSLGYILEKHCGGFLLPPSYAPVVTSELSDQMTFMERVKNMIYVLYFRFWFQLFDMKKWDQLYSEVLRRPTTLFEIMGKAEIWLIRNYWDFQFPHPRLPNVEFVGGLHCKPAKSLPKEMEDFVQSSGENGIVVFSLGSMISNMTEERANVIASALAKIPQKVLWRFDGNKPDTLGHNTRLYKWIPQNDLLGHPKTKAFITHGGANGIYEAIYHGIPMVGVPMFADQPDNIAHMKVKGAAVGLDFDTMSSTDLLNALTTVINDPIYKENAMKLSRIHHDQPMKPLDRAVFWIEFVMRHKGAKHLRVAAHDLTWFQYHSLDVIGFLLACVTTVIFIITKCLFCVWKFVRTEEKGKKD

SEQ ID NO: 8351 - protein, 486 aa, Ochotona princeps
MSVKCLSLMLLLQLSCYFSSGSCGKVLVWPMEFSHWMNLKTILDELVQRGHEVTVLKSSASVVINAKNETGIKFETFPTSYTKDELETFFGYWINKWLYGISADKYWEYFPALAEFTLKFSDIFEKFCKEVVLNKKLMTKLQEARFDVVVADPISPGGELLAELLKSPLVYSLRGFPGYVLEKHGGGLLFPPSYVPVILSQLSGKMTFMERVTNMLCMLYFDFWFPKLNEKRWDQFYTETLGRPATYFEIMGKADMWLIRSYWDLEFPRPLLPNFEFIGGFHCKPAKPLPEVLWRFEGKKPDTLGPNTRLYSWIPQNDVLGHPKTKAFVTHGGANGVFEAIYHGVPMVGLPLFGDQLDNILHMKAKGAAIKLNWKTMSSAELLNALKTVINDPSYKENVMTLSRIHHDQPMKPLDRAVFWIEHVMRHKGAKHLRVAAYDLTWYQYHSLDVIGFLLACVTIITYLVIKSCLLLYQKLVKMGKKEKRN

SEQ ID NO: 8352 - protein, 382 aa, Branchiostoma floridae
CEALVYDNKMISQLRQMNFDIIIIDPAMVCGNIVARLLNIPLVIIEAPYIMPGFLEYATQAPVPIATFYSFRTDFWQRLKNLVWHCVAGAIMRTFAGRFRPIASRALGYDTTILELMAEADLFLMRGDFVMHPPHPAMPNMVYIGGYHVQRVNPLPKDLEKFLEESGGVVVLSFGSYAKVMGKEKAEMLAAGLARVPFKVIWKFQGQRPKNTGENTLLMSWIPQNDLLAHPKTLLFITHCGINAVYEAMFHGVPMVRVPAFAEQHGNSDNLETLGTGVTLDIFTMTSDDLYEAIMEVANNKTYKSAAVRLAQLQRDQPQSPMDRAVWWIEHVIRHGGLPHLKSAARHLSLLQYHLLDVAALLSAAGVAMVLVLWLCCRCCCR

SEQ ID NO: 8353 - protein, 709 aa, Pristionchus pacificus
MRLELLCLISIAQSYKILVYNIRYSHSHSNFIGNVADILVEAGHDVTSLIPTISNGKDGTVKSKIIYVEGSEEAKKGLVSMLDGPSFLELGESNLLRMGFALAPVFAAQCERTLEEKELIEQLKNKNYDVYIVENSDMCGMALSELIKPKSIIMTVTSALYGHQYEEVGVPQPLSYNPCEIGFREPRKLVHEIFRRRFGDDFPSFEQITSRIAYCFTNTEPLIDFATPTINRVIPLGGLGAKAPKELDEHWQRVLSLRPRSVLLSFGSMVRSANLRLDVKRAFLKTMVAFPDVTFIWKYETPSDEFAVDEAAKVENLVLTEWMPQNDLLSHDGLAVFITHGGMGSTQETALRGVPALFVPIFADQPRNAGGMAWNRLGKVLNKFHLHDHTIIIAHLKELLENDEYRANARRTSRMLAAKPFSSRDQLIKYTEFAAEFACDLSKHSMAAAPFLAKATGILVQTGKVAAMGGAAAIGTAVLGGVSVAVAGGLAIGQALIERDTEIKKEKIRVELEVEQVKADLKQKELQAEVELKKLSVEQAVAECEAGKDAAVAAVRLEAAKEQETVLREAEERHREEQEALAAQAQAAADLLKAQNADQAAMLAFVQEQRINELNAHNNDLKNIIASTNTMFGAVFTELTGIIGVQSAHITRLQEDLRARTPVAIEGMLIELLSLFLKLYTAAVDVIVLRGNEGVPSAFDSSGSGGALM

SEQ ID NO: 8354 - protein, 529 aa, Rattus norvegicus
MPQKWISALLLLQISFCFRSGNCGKVLVWPLEYSHWMNLKIILDELVQRGHEVTVLRPSSSVFLDPKKASGLVYETFPTTSNNDEVEKFFTQWVNTWTYDVPKYTCLRYYPSLNKMFGQFSDLWLQLCREVVSNKHLMAKLKESQFDVVLSDAVGPCGELIAEILQLPFVYSLRFGIGYGIEKYSAGQPFPPSYVPIILSGLSGQMTFMERVENMLCLLYFDFWFESFPAKDWDPFFSEILGRPTTMVDTMKKAEIWLIRSYWDLEFPRPSLPNIEFVGGLHCQPAKPLPKEMEDFAQSSGEHGVVVFSLGSMIRNITQERANTIASALAQIPQKVFWRFEGKKPDTLGPNTRVFKWIPQNDLLGHPKTKAFVTHGGANGIYESIHHGIPMVGIPLFAEQRDNVAHMVAKGAAVSLDFHTMSSSDLLNALKAVINKPSYKKKVMWLSAIHHDQPLKPLDRAVFWIEFVMRHKGAKHLRPLAHNLAWYQYHSLDVIGFLLACVLAIVLLAVKCCLFLYRFFVKVAKNKRD

SEQ ID NO: 8355 - protein, 398 aa, Cyprinodon variegatus
MLQFVSGAQVPKNGHLPYKGIKTFTFILQYIHRPLYQDYFTQIRAHNVERHCAQLPAPPSYVPAAMSSLTDKMDFPQRMGNVLFYALQDFLLEQFMWKEFDKYYSEVRGTPTSACKMMGNADFWLLRTYWDFDFPRPSLPNIKFVGGIHCKPAKPLPKEMEEFVQSSGDAGIVVFSLGTVVKNLTTDKANMIASALAQIPQKVLWRYSGEKPQTLGPNTRLYDWIPQNDLLGHPKTRAFVTHGGTNGIYEAIYHGVPMVGIPIFGDQPENMVHVETKGAAVTVNLNSLNADELRDAVNTVINNKSYKENVMRLSRINHDRPMSPRDEAVFWIEFTMRNKGAKHLRVQSHDLTWYQYHSLDVITFFIILDLLLLIILLKTCSFCFKRCCGRKTTKRKAE

SEQ ID NO: 8356 - protein, 532 aa, Esox lucius
MVSVRRPLLYGALLLLYLYPLTQGGNVLVFPGEHSHWLNMRTILDELVDRNHNVTVLVCTASPSIDYSRSERYHFHVYDVPFDRQHLKSVNDRFIEFWMYDAQNASVLQIGLEIRDLMQKMNVIQLSVCDAILRDQALMESLRRVKFDVLLADPMLMCSDLLADVLDLPLVLSIRFSFGLVLERQCGQMPAPSSYVPSPPLAYTDQMSFFERVQNFAMYFFNDVLMYVHCLTTVNSYYSEIKGTPTTFCEIMGKADIWLIRTYWDFEYPRPFLPNFKFVGGLHCKPAKPLPAAMEEFVQSSGDDGIVVFSLGSMVKNLTKERGNTIASALGQIPQKVLWRYAGVKPETLAPNTRLYDWIPQNDLLGHPKTKAFITHGGTNGLYEAIYHGVPMVGVPLFADQPDNIMHMKTKGAAVMLDFNKMTSQDLVDGLNSVINDPTYKENMMRLSRIHHDQPMKPLDTAVFWIEFVMRNKGAKHLRVESHNLSWYQYHCLDVAAALLSVVGLITVVTVKTCTFFLRKCFRKAKARQKTE

SEQ ID NO: 8357 - protein, 696 aa, Cavia porcellus
MSVKLTVFLLLLQLNSYFDSGSCGKVLVWPMEFSHWINLKTILDVLVQKGHEVTVLRPSTSISYHVEKESAIKFEDYPASLSASDWEYIFTEGLRKVIYELPKESIWTYFSTLQEIMWEETDYLKTLCEDVVRNKNLMSKLQESRFDVILADDFIPCGDLIAELLNLPFVYTHRFFPGYTYEKYGGGLSVPPSYVPVGLSELNDQMTFLERVKNMIYVLYFDFWFQTFNEKKWNQFYSEVLDGNHWINIKTILDALVQKGHEVTVLRPSISISFYVEKESAIKFEDYPTSLSASYWEYIFTEGLRKMIYELPKESVWTYFSTMQKITWEDSDYLKTLCEDIVQNKELMSKLQESRFDVILADSLVAGGDLIAELLNIPLVYTHRFFPGNTYEKYSGGLSYPPSYVPVAFSELSDQMTFMERVKHMIYVLYFDFWFQMFNEKKWNQFYSEVLGRPTTLTETMGKADVWLIRTYWDLEFPRPSLPNFDFIGGLHCKPAKPLPKVVWRYDGKKPATLGPNTLLYKWIPQNDLLGHPKTKAFITHGGTNGIYEAIYHGIPMVGIPLFGDQADNIVHLKAKGAAVRLNFITMSSTDLVNAVNTVINDPSYKENAMRLSRIHHDQPVKPLDRAVFWIEFVMRHKGAKHLRVAAHDLSWFQYHSLDVIVFLLASVATVIFIITKCCLFCCHKFAKTGKRKKRE

SEQ ID NO: 8358 - protein, 510 aa, Podiceps cristatus
VLWLLAVLGWGSGGKVLVWPADNSHWLNMEYILQELVIRGHEVTVLLPSCFLILDPTQPSPFQFEVVEVPVTKKEMATLLEEAFYFWFYQEKVLPVWESFYKISQLMYKLKNATKIICDEVLKNGALLERLRTSTFDVLLADPLVPSGELVAEKLGIPFVYTIRFSIGNTLERHCGTLPAPPSYVPAILSHLTDRMSFLERLKNIFTYAIQDIIYHYLLWGSWDQYYSDVLGRPTTLCETMGKAEIWLIRTYWDFEFPRPFLPNFEFVGGLHCQPAKPLPKEMEEFVQSSGEHGIVVLSFGSMVYNLTDEKSNVIARALSQLPQKVLWRYKGKKPETLGSNTRIYDWIPQNDLLGHPLTKAFITHGGTNGIYEAIYHGIPMVGIPMFADQHDNIAHMRAKGAAVELDFSTLKMQDLVDALNTVINNSTYKENALRLSKIHHDQPVKPLDRAVFWIEFVMRHKGAKHLRPAAHHLTWYQYHCLDVLAFLLTCAAIAVFILVKCCLFCCRRC

SEQ ID NO: 8359 - protein, 491 aa, Cricetulus griseus
MSVKIIAALLLLQLSGFFGPVSGGKVLVWPVEFSHWLNLKTILDELVKKGHEVIVLRPSVSFSYEVEDTSAIEFETYPTTYDMDGLEEFFIESINKYIYELPKLSFWRYFLMLQELFLLESEYSESLCKDVVLNKELMTKLQNSSFDVILADPFLPCGDLLAEILKTPLVFSLRFFPGSTYVKYSGGLPLPPSYVPPAMSELSDRMTFMERVQNVLYVLCFDFWFQTFNEKKWNQLYTEVLGRPTTLLEIMGKADIWLIRTYWDLEFPHPVLPNFDFVGGLHCRPAKPLPKEIEDFVLWRFEGKKPDTLGSNTQLYKWIPQNDLLGHPKTKAFITHGGTNGIYEAIYHGVPVVGIPLFTDQFDNVVHMKTKGAGMRLDFLTMSSTDLFNAVKTVTTDPSYKENAMRLSRIHHDQPVKPLDRAVFWVEYVMRNKGAKHLRVAAHDLTWFQYHSLDVLGFLLACVVTVIFIITKCCLFCCQKFAKGGKKKKRE

SEQ ID NO: 8360 - protein, 530 aa, Ceratotherium simum
MSMKWISVLLLLQLGCYFSPGNGGKVLVWPIEYSHWINMKTILDELVQRGHEVTVLTSSASILIDTNKPSAIKFEIYPTSLTKHDFEVLFKKMIHRLTYDLPKATFWTYFSLMREIFWEFSDCFEKFCKNLVLNKKLITKLQESGFDLLLADAIGPCGELLAELLKITLVYSLRFSPGYQIEKYSGGLPIPPSYVPVVMSELSDQMTFVERVKNMMYVLYFDFWFQTFNEKKWDEFYTEILGRPTTLSELRRKAEMWLIRTYWDFEFPRPLLPHFEFVGGLHCKPAKPLPKEMEEFAQSSGENGIVVFTLGSMISNMTEERANVIASALAQIPQKVIWRFDGKKPDTVGPNTRLYKWIPQNDLLGHPKTKAFITHGGTNGIYEAIYHGIPMLGLPLFADQPDNIAHMKAKGAAVRLDFNTISSTDLLNALKTVINDPSYKENAMKLSKIQHDQPVKPLDRAVFWIEFVMRHKGAKHLRPASHDLTWFQYHSLDVLGFLLACVGTAIFVITKCCLFCCQKFAKTERKEKRE

SEQ ID NO: 8361 - protein, 530 aa, Rattus norvegicus
MSVKMTAALLLLHLTIFFGSGSGGKVLVWPVEFSHWLNLKIILSELVKKGHEVVVLKPSVSFSYEVDKTSAIEFESFPSSYSIADVEVIFMDCVNESIYELPKQSFWGYFLMLQKLFERTSDYSERLCRDAAFNKELMTKLQNSGFDVILADPFTPCGDLLAEILKIPLVYSLRFFPGSTYEKYSGGLPMPPSYVPIAMSELSDRMTFVERVKHMIYVLCFDFWFQVFDEKKWNELYTEVLGRPTTLSETMAKADIWLIRTYWDLEFPHPVLPNFDFVGGLHCRPAKPLPKEIEDFVQSSGEHGVVVFSLGSMVGSLTEERANVIAAGLAQIPQKVLWRFEGKKPETLGSNTRLYKWIPQNDLLGHPKTRAFITHGGTNGIYEAIYHGIPVVGIPLFGDQKDNIVHLKTKGAAVRLDFLTMSSTDLLTALRTVTNDPSYKENAMRLSRIHHDQPVKPLDRAVFWIEFVMRHKGAKHLRVAGHDLSWVQYHSLDVIGFLLACVVTVMFILKKCCLFCCQKFTKAGRKKKKE

SEQ ID NO: 8362 - protein, 529 aa, Ochotona princeps
MSLKQVSVLLLLLQLSCCFRSGNCGKVLVWPMEYSLWLNLNVILDELVRRGHEVIVLRNSASIFLDPSKHTGIKFETFPIDATKADSEAFFVQLVTTWTNALQDPYWEYLPALQKLFSGYSDDREFLCKAAVLNKKLMRKLQESKFDIIISDTFGPCGELLAELLKIPFVYSLRFSPGYTMEKYSGGLSLPPSYVPMMLSDLSGQMTFMERVKNMLFMLYFDFWFQTFNEKRWDQFCSEVLGRPVTFYELVAKADMWLIRSYWDLEFPRPTLPNVHFVGGLHCKPAKPLPKDMEDFVQSSGEEGVVVFSLGSMVSNMTEERANVIASALAQLPQKVLWRFDGKKPETLGPNTQIYKWIPQNDLLGHPKTRAFVTHGGANGIYEAIYHGVPMVGLPLFADQPDNIAHMTAKGAAVRLNWKTMSSADLLNALRTVIHDPSYKENVMMLSRIHHDQPMKPLDRAAFWIEHVMRHKGAKHLRVAAHDLTWYQYHSLDVIGFLLACVTITTYLVIKICLSVYQKLVKTEKKKSD

SEQ ID NO: 8363 - protein, 530 aa, Loxodonta africana
MSMKWISVLLLIQLSCCFSCGTCGKVLVWPPEYSHWMNMKTIVDELIQRGHEVTVLTPSASVLIDPNKPSAIKFEVYPTSLTEDEFEYVFMKLVRRWTNEVPKDTFWTCFSVLQEILSEFSDFMERLCKDVVFNKKFMMKLQESRFDVILTDAVFPCGELLAELLNIPFVYTVRFTTGYTVEKYNGGLLTPPSYVPIVMSELPDRMTFMERVKNMIYVLYFDFWFQFFNEKKWDQFYSEVLGRPTTFSETRGKAEIWLVRNYWDFQFPRPFLPHFHFVGGLHCKPANPLPKEIEEFVQSSGKHGVVVFTLGSMVSNLTEERANMIASALAQIPQKVLWRFDGKRPDTLGPNTWLYKWIPQNDLLGHPKTKAFITHGGANGIYEAIYHGIPMVGIPLFADQPDNIAHMKVMGAAVRLNMDTMTSTDLFNALKTVIYDPSYKENAMRLSAIHRDQPVKPLDRAAFWIEFVMRHKGAKHLRPAALSLTWYQYHSLDVIGFLLACVAIVSFLVIKCCLLGYQKFYKTRKKKKRE

SEQ ID NO: 8364 - protein, 531 aa, Heterocephalus glaber
MMSMKWTSALLLLQMSFYFNSGSCGKVLVWPMDYSHWMNIKNILEELIQRRHEVTVLRPSSFIFVDINSSSGIKFETFTTSASRDDWEKYFTKWITTWMNLGSISSCFAYFPEVEKIFKEFSDTWQNLCKETVSNKILMNKLQESRFDVLLADPIAPCGELVAELLKIPFVYTLRASPGFQLEKFGGGLILPPSYVPVVMSGLGGQMTFMERVKNMICMLYFDFWVEMLNEKKWNQLYSEVLGKRTTIYDTTAKAEMWLIRSYWDLEFPHPSLPNFDFVGGLHCKPAKPLPKEMEDFVQSSGEHGVVVFSLGSMVSNMTTERANMIASALAQIPQKVLWRFDGKKPDTLGPNTRLYKWLPQNDLLGHPNTRAFVTHGGANGIYEAIYHGIPMVGIPLFAEQHDNIAHMKAKGAAVKVEFITLSSTELLNALDTVLNNTSYKENAMWLSTIHHDQPVKPLDRAVFWIEFVMRHKGAKHLRPLAQNLTWYQYHSLDVIGFLLACVATVTFLVIKSCLFCSQKFVKKGKKQKRE

SEQ ID NO: 8365 - protein, 502 aa, Branchiostoma floridae
MFNSHWMVAASIGQALVDKGHTVSVIVEEDIVEKRRAERPDFTFETFQDDGFGSRLRQFQDDVFRMAEPLFNYDELRQSRKVSDWARKHCEYLLGQGGQDSDLLARLKTAQYNVVISDYYLRCGSIVAAYLEIPHIANSPDGGRFFDEIVTGVPLPLAYVPSVESGFTDQMTFLQRVENACLENACRSSVSIMRRSWLFSNVYNDLVRKYVSEKDTIHSLTSRTDLWLYQTDTVLGFPRPSMPNMVQVGGLMAGRPVGPLSEDMGDFMQSSGDDGVIVVSFGSMVHTMSTERKEMFAAVFAQLRQKVVWRYAGEKPAGLGNNTRLLSWLPQNDLLAHSKTRVFVNHAGLNGVYEALYHGVPMVCFPLFGDNPGNAARVVARGLGVSLDFRTVTSDQLYQAVHQVLTNNSYRETAARLSHLHRDQPQSPMERAVWWIEHVIKHGGLPHLRARAVELPWYQYYLLDVAAFLLGICSAVLGTLWYSFSFVCRKVCCKRGGKLKSQ

SEQ ID NO: 8366 - protein, 530 aa, Trichechus manatus
  MOD_RES (99)..(99): Any amino acid
  MOD_RES (194)..(194): Any amino acid
  MOD_RES (339)..(339): Any amino acid
  MOD_RES (382)..(382): Any amino acid
MSMKWVSVLLLIQLSCYFSSGTCGKVLVWPTEYSHWINIKTILDELVQRDHEVTVLTSSASILIDPNTLSAIKFEVYPTSLTKDDFEFVFMKWIRKITXHLPKDIFWTYFSLLQEMAWEYSDCIERLCKDVVFNKKLMVKLQESSFDVVFADAIGLCGELLAELLKIPFVYSVRFTSGYTFEKYSGGLLTPPSXVPIVMSELQDQITFLERVKNMIYVLYFDFWFQGFNKKRWDQFYSEVLGRRTTLFETMGKAEIWLIGTYWDFEFPHPFLPHFYFVGGLHCKSANPLPKEIEEFVQSSGTHGVVVFTLGSMLSNITEERANTIASALAQIPQKVVWXFDGKKPDILGPNIRLYKWIPQNDLLGHPKTKAFITHGGTNGIXEAIYHGIPLVGIPLFVDQPDNIAHRKANGAAVSLDMKTMTSTDLLNALKTVINDPFYKESAMRLSAIHHDRPVKPLDKAVFWIEFVMRHKGAKHLCPATLSLTWYQYHSLDVIGFLLACVAVVTFLVIKCCLFGYQKFMKTGKKKKRE

SEQ ID NO: 8367 - protein, 530 aa, Microtus ochrogaster
MSVKMTAALLLLQLSSFFGSGSAGKVLVWPMEYSHWLNLRIILDELVKKGHEVTVLRPSSFLSYEVDNTSAIEFETYPSSYSTADVKGLFMESIRKQIYEMSKKSFWRYFLMLQDVVWLYSDYFESLCKDVVFNKDLMTKLQNSSFDVIVSDPFIPCGDLLAEILKIPLVYSLRFFPGSTYEKYSGGLPLPPSYVPPAMSQLSDRLTFTERVQNLIYVFYFDFWFQTFNEKKWNQFYSKVLGRPTTLSEMMGKADIWLIRTYWDLEFPHPVLPNFDYVGGLHCRPAKPLPKEIEDFVQSSGEHGVVVFSLGSMVGALTEERANVIAAGLAQIPQKVLWRFEGKKPDTLGSNTRLYKWIPQNDLLGHPKTRAFITHGGTNGIHEAIYHGIPVIGIPLFGDQFDNVVHMKTKGAGVRLDILTISSTDLLHAVKTVINDYSYKENALRLSRIHHDQPVKPLDRAVFWIEFVMRHKGAKHLRVAAHDLTWYQYHSLDVLGFLLACVLTVMFVITKCCLLCCQRFTKSGKKKKRE

SEQ ID NO: 8368 - protein, 547 aa, Drosophila willistoni
MELADSCLKDFAMVIRNTFLLTLVVFIVVGSAQGANILGIFTSPSPSHNIVHLSEAKVLADNGHNVTIITCAKLPVNHENFTVVRIPINKEAERQINEGYAAMVQGDSTSFIGMLLHSSKFMRNSLQIMFEVLKDQRVKDLYENKDNKFDLVISGYFVNNYQFGVAHKLKAPLIISFSAQPFGILNTLVGNPLELSYVPAMYTVVKTGETMTFGQRLYTFALTVVQTIWFIVFEWENERRYLELYGDDPSMPKYADLNKNVSLMFIATHGLSEGPIRPNVPAFVEIGGIQVKDKPDPLPKDIEQFLNNATHGAILLSLGSNVKGDHLKPEIVQNMFKVLSNLKQNVIWKWENLEQTPGESSNILYSKWLPQDDILAHPNTKLFITHAGKGGVVESQYHGKPMLALPVFADQPTNAQTMVSHGFGLSLKLLELQADEFHSAIIELLENPKYTTSVQTFSNLFRDRPLSARQTVLYWSEYVIRHHGAKHIQSPLVHMDFISANNLDIFALFLLISLISLWLTKIMLTFAVRKFKSKSSMLAKKIKVKTK

SEQ ID NO: 8369 - protein, 521 aa, Stomoxys calcitrans
MLWMLLCCHSTSTEGHRILAVFSFPGKSHYMMHSALIRELVQRGHQVTMVAAFSLKHLNLGHNYTEILIEPVYDFWSDVIPFLKADNIFDLTTIGVLDYHYMLEVIGLTTTEHALKQPKIQELINHPHPRGEYDLLLCEQFYQEPFLALAHLYDIPVVTSGTLGFENHMSQMMGLLSPWSFIPHGFTDYSDRMTFKERLLNTYYSLGEDILREFHYFPQMDRMVQKYFGHLNVSIPSVSKMEKNISVMLLNSHIPLSAPVPLVPGMVFVGGMHIYPPKKLPQDIQQFLDEAPEGAIYFSLGSNVQSKDMPDDKLRIFLDVFASMKQRVIWKFENESIANLPKNILIKKWLPQSDILAHGNVKVFITHGGLFGTQEGVHHGVPMLGIPFYCDQQLNLKKAERNGYAISLHFQSITHDVLKDALNRLIYDASYHDNVKRYSNIFRDRPIQSRDAAVYWIEYVIRHKGAPQIRSAGLDLTWYQFYLLDVIAFVVAALLLASLAIVILVRQILYGIRQRRKIKMN

SEQ ID NO: 8370 - protein, 485 aa, Odobenus rosmarus
MSMKWISVLLLQLSCYFSSGSCGNVLVWPTEYSHWINIKTILDELIQRGHEVTVLTSSASILVDPSKSSTIKYEIYPVHLQRKDFEDIFRKLIDAWIYNLPRDTFWGYFSQMQDIMWEYSDCLQKFCKDIILNRKLMTKLQESKFDVILADAIGPCGELLAELLKIPFVYSLRFSPGYVFEKYSGGLPLPPSYVPIIMSELSGQMTFMERVKNMIYVLYFDFWFQSFNEKSWDQFYSEVLGRPITLCELMGKAQIWLIRTYWDFEFPRPLLPNFEFVGGLHCKPAKPLPKVLWRFDGKKPDTLGPNTRLYKWIPQNDLLGHPKTKAFVTHGGANGIYEAIHHGIPMVGIPLFADQPDNIANMKAKGAAVSLDFHTLSSTDLLNALRMVINDTSYKENAMKLSRIHHDQPVKPLDRAVFWIEFVMRHKGAKHLRPASHNLTWFQYHSLDVIGFLLACVATALFVTTQCCLFCYQKLAKIGKKEKKE

SEQ ID NO: 8371 - protein, 444 aa, Pongo abelii
MSMKWTSALLLIQLSCYFGSGSCGKVLVWPTEFSHWMNIKTILDELVQRGHEVTVLAYSTSILPDPNNPSALKFEVSPTSLTETEFEDSITQLVKRWSDVPKDTFWPHFLQVQEMMWSYSDMIRKFCEDVVSNKKLMKKLQESRFDVVLADAVSPCGRPTTLFETMAKAEIWLIRNYWDFQFPHPVLPNVELVGGLHCKPAKPLPKEMEEFVQSSGENGVVVFSLGSMVSNTSEERANVIATALAKIPQKVLWRFDGNKPDTLGLNTQLYKWIPQNDLLGHPKTRAFITHGGANGIYEAIYHGIPMVGVPLFADQLDNVAHMKAKGAAVSLDFNTMSSTDLLNALKTVINDPLYKENAMKLSRIHHDQPVKPLDRAVFWIEFVMRHKGAKHLRVAAHDLTWFQYHSLDVIGFLLACVAAVIFIITKCLFCVWKFVRTGKKGKRD

SEQ ID NO: 8372 - protein, 530 aa, Jaculus jaculus
MSVKWASVFVLLHLMGLLRRGACGKVLVWPTEYSHWINIKIILEELVHRGHEVTVLTSSASVLIDPSQPSAIKFEVYSISMTKEEVEAFYMSLISEWMNHFKKNSFWPNYSKLKQRFDEHTDFVRNLCRGVVLNKSLMEKLRASKFDVVLADAVSPCGELLAELLNTSLVYTLRFTPGYTYEKYSAGLPFPPSYVPVVLSELSDQMTFMERVKNMIHVLYFDFYFYTSDEKKWNQFYSEVLGRPRTIVELMSTADIWLIRMYWDLEFPRPLLPNVDFIGGLHCKPAKPLPKEMEDFVQSSGEHGIVVFSLGSMVYNLTEEKANMIASALAQIPQKVVWRFDGKKPDTLGSNTRLYKWIPQNDLLGHPKTKAFLAHGGTNGLYEAIYHGIPVVGIPLFADQPDNIAHMTSKGAAVRVDFSTLSSADLLSALRTVLNDPSYKENAMRLSRIHHDQPVKPLDRAVFWIEFVMRHKGAKHLRPALHDLSWFQYHSLDVLGFLLACVLSVVFVITKCCLLCCGKFGKAGKKEKRA

SEQ ID NO: 8373 - protein, 530 aa, Carlito syrichta
MVSEKWASVVILLQFCFAGCGYSGKILVWPCDMSHWLNLKTILDKLIERGHEVTVLTYSQTFLIDYKKPSALKFVVVNVTQDKDYAKKSNNEFVNFVLHVLPNSSTWQSVIKLNDFFVKLSGFFKFLCESFVYNQTLMKKLQEANYDVMLIDPVIPCGELLAELLAVPFVVSLRASIGGNMERHCGKLPAPPSYVPVLMSRLTDNMTFLERVKNIMLSFFFDFWIQDYNFHFWKDFYSKILGRPTTLCETVGKAEMWLIRTYWDFEFPQPYLPNFEFVGGLHCKPAKTLPKEMEEFVQSSGEDGIVVFSLGSMLQNLTTEKADLFASALAQIPQKVLWRYQGKKPATLGANIQLYDWIPQNDLLGHPKTKAFITHGGINGIYEAIYHGVPMVGVPIFGDQYDNIIHMKAKGAAVEINFSTMTSADVLRALRTVIYEPFYKENAMRLSRIHHDQPVKPLDRAVFWIEYVMRHKGAKHLRPAVHDLTWFQYYSLDVIGFLLACIATALFLIIKCCLYSCQKFGKTGKKKKKE

SEQ ID NO: 8374 - protein, 530 aa, Rattus norvegicus
MPGKWISALLLLQISCCFQSGNCGKVLVWPMEFSHWMNIKTILDELVQRGHEVSVLKPSAYYVLDPKKSPDLKFETFPTSVSKDELENYFIKLVDVWTYELQRDTCLSYSPLLQNMIDEFSDYYLSLCKDTVSNKQLMAKLQESKFDVLLSDPVAACGELIAEVLHIPFLYSLRFSPGYKIEKSSGRFILPPSYVPVILSGMGGPMTFIDRVKNMICTLYFDFWFHMFNAKKWDPFYSEIFGRPTTLAETMGKAEMWLIRSYWDLEFPHPTLPNVDYIGGLQCRPPKPLPKDMEDFVQSSGEHGVVVFSLGSMVSSMTEEKANAIAWALAQIPQKVLWKFDGKTPATLGPNTRVYKWLPQNDLLGHPKTKAFVTHGGANGVYEAIYHGIPMVGIPMFGEQHDNIAHMVAKGAAVTLNIRTMSKTDLFNALKEIINNPFYKKNAVWLSTIHHDQPMKPLDKAVFWIEFVMRHKGAKHLRPLGHDLPWYQYHSLDVIGFLLSCSAVIAVLTVKCFLFIYRLFVKKEKKMKNE

SEQ ID NO: 8375 - protein, 530 aa, Fukomys damarensis
MSMKWISALLLLQLDCYFSFGSCGKVLVWPMEYSHWMNMKNIVEELIQRAHEVTVLRPSSFIFVDVNSSSGIKFETFITSTNDDQLEDIYIESVNKWMSVGSIDTCLAYFPVLEDTIRDYSAIWENICKDVASNKKLMTKLQESRFDVLLADPIAPCGELVAELLKIPFVYSLRFSPGFQMEKHGGGLIVPPSYVPLTLSRLSGQMNFIERVKNMICLLYFDLWFGTFNEKNWNELYSEILGRPTTLHEIMGKAEMWLIRSYWDLEFPRPSLPNFDFVGGLHCKPAKPLPKEVEDFVQSSGEHGVVVFSLGSMISSMTEERANAIASALAQIPQKVLWRFEGKKPDTLGSNTRLYKWLPQNDLLGHPKTRAFVTHGGANGVYEAIYHGIPMVGIPLFAEQHDNVAHMKAKGVAVKVEFMTISSTELLNALKKVLNSPSYKENAMWLSTIHHDQPMKPLDRAAFWIEFVMRHKGAKHLRPLAHNLTWYQYHSLDVIGFLLAGVVTITLLVVKCCFFISRKFLKMKKKKKRE

SEQ ID NO: 8376 - protein, 529 aa, Ochotona princeps
MSARWISVLLLLQLSCHFSAVGCGKVLVWPMDFSHWINMKTILDELVQRGHEVTVLKSSVSVLLDHNESSAIKYETFPVSTPKDVYEKAFSNDLMKHVYELHKYSFWNFLSKLQQIQYEISDFFQIICRDAVLNKELVTKLKESRFDVIFADTLCPCGELLAELLKVPFLYTHRLFPGYTYEKYSGGFLLPPSYVPITMSELTDKMTFMQRVKNMLYVLYFDFWFQFFNEKKWDQFYSEVLGRPTKLTELMGKAEMWLIRTYWDLEFPRPLLPNVDFVGGLHCRPAKPLPKELEDFIQSSGEEGIVLFSLGSMVSNLTEETANVIATALAQLPQKVLWRYSGKKPRTLGPNTQLHTWVPQNDLLGHPKTRAFITHGGTNGIYEAIHHGVPLVGIPLFADQFDNIAHVKAKGAAVKVDFITMSSADLLSAVKTVINDPSYKENAMTLSRIHHDHPMKPLDRAAFWIEHVMRHKGAKHLRVSAYDLTWYQYHSLDVIGFLLACVTTAALIIIKCCLFCYRMFVKSVKRKRE

SEQ ID NO: 8377 - protein, 513 aa, Anopheles darlingi
MKCALCIAALVVLLACVAPLEAYRILCVYPSSGRSHVLIGQALLKGLAERGHEVTMVSPFKLSKPVSNYREIVVPKVDLSDMTKDFLQKNSGQSVSMMLNLFQSQIDTAEMLLQDPQFLAIKNEHFDLVIVGYFVADYVLGLGPHFNAPTVILYSAGMTKMTADYIGNPRAVSTVPSMLLGGKEPMGFVKRVINFLVSGFEDVISAVLVYAQTEYYQRYFPSDRYPAYTDVRKNVSLVLLNTHFSQAVPRPYLPNMIEVGGLQIKSKPDPLPADIQEWLDGAEHGAVYFCLGSNLKSADLPPAKLDAILKTFAKLKQRVLWKWESDTIPNAPPNVLSKAWLPQDDVLAHRNVKLFISHGGLGGVAEAKYHGVPVLGIPIFAEQHQNVQTMVEEGIAMLLEYQELDEQSFSRAVNIMLREHRYTERVKEISTRYRDRPQSSMNLACYWIEYVARHRGAPHLHYPGADMNFLQRESLDVIAALLLAGYLVFKVLKLLIKFIFRKLFKSTRKTKQN

SEQ ID NO: 8378 - protein, 325 aa, Rattus norvegicus
MTGVTPGVFAVLSEGILSSCTVNFPLPSGLPESTLHGRPTTLSETMAKADIWLIRTYWDLEFPHPVLPNFDFVGGLHCRPAKPLPKEIEDFVQSSGEHGVVVFSLGSMVGSLTEERANVIAAGLAQIPQKVLWRFEGKKPETLGSNTRLYKWIPQNDLLGHPKTRAFITHGGTNGIYEAIYHGIPVVGIPLFGDQKDNIVHLKTKGAAVRLDFLTMSSTDLLTALRTVTNDPSYKENAMRLSRIHHDQPVKPLDRAVFWIEFVMRHKGAKHLRVAGHDLSWVQYHSLDVIGFLLACVVTVMFILKKCCLFCCQKFTKAGRKKKKE

SEQ ID NO: 8379 - protein, 446 aa, Ochotona princeps
MSRKCISVLLLLLQLSCCFRSGSGGKVLVWPMEYSHWMNLNVILDELVRRGHEVIVLRNSASIFLDPSKHTGIKFETFPVSFTKNDLENFFTQWVTNWTETDKDSYWKYLLALQDIFGVYSGLYEILCKEAVLNKQLMAKLQEAKFDVILSDAIGPCGRPVKFYDLVGKADMWLIRSYWDLEFPRPTLPNVHFVGGLHCKPAKPLPKDMEDFVQSSGEEGVVVFSLGSMVGNGTEERANVIASALARLPQKVLWRFDGKDPKSLGPNTRIFKWIPQNDLLGHPKTRAFVTHGGANGIYEAIHHGIPMVGIPLFGEQPDNIAHMTAKGAAVRLNWKTMSSADLLNALRTVINDPSYKENIMTLSRIHHDQPMKPLDRAVFWIEHVMRHKGAKHLRVAAHDLTWYQYHSLDVIGFLLACVTIISFLIIKTCLFICQKFADIGRKKKRD

SEQ ID NO: 8380 - protein, 529 aa, Condylura cristata
MSVKWMSALLLLQLGCYFSSGSCGKVLVWPTEYSHWMNIKTILDELVARGHQVVVLTSSASILIDPSKPSAIKFEVYPTSFSKAEFESAFKQVVSEWTYELPKDSFWSYFSKSQDILWRFFDIVNQLCKDVVKNKKLMTKLQESRFDLILSDPVGPCGELLAEVLKVPFVYTLRFIPGYQFEKHIGKLPIPPSYAPFVLSELSDKMTFTERVKNMIYMLYFDFWFQTINYKQWNEFYSEVLGRPTTLAETMGKAEMWLIRTYWDFEFPRPFLPNFEFVGGLHCKPAKPLPKEMEEFAQSSGENGIVVFTLGSMVSNMPEERANVIASALAQIPQKVLWRFDGKKPATLGANTRIYKWIPQNDLLGHPKTKAFITHGGTNGIYEAIYHGVPMVGVPLFADQPDNMVHMMAKGAAVRVDFHTMSSTDLLNALKTVINDPSYKENIMKLSRIQRDQPMKPLDRAIFWIEFVMRNKGAKHLRPASHDLTWAQLHSLDVIGFLLACVVTAVYVIIRCFLFCCRKVVKSGKDKRE

SEQ ID NO: 8381 - protein, 530 aa, Aotus nancymaae
MALKWISVLLLIQFSCYFSSGSCGKVLVWPMEYSHWINMKTILDKLVSRGHEVTVLASSASILVDSSKSSAIKFEVYPTSLTKNDFENVFIKQITRWIYNCPKYTFWEYFSQVQEMLWNYGKCIKTFCEDVVSNKRLMTKLQESKFDVVLADAIAPCGELLAELLKVPFVYSLRFSPGYILEKHSGRLLFPPSYVPVAMSELSDQMTFVERVKNMIYMLYFDFWFQIFDLKNWDQFYSDVLGRPTTLFETMGKAEMWLFRNYWDFEFPRPILPNVDFVGGLHCKPAKPLPKEMEDFVQSSGENGIVVFSLGSMVSNITEERANVIASALAQIPQKVLWRFAGKKPNTLGSNTRLYKWLPQNDLLGHPKTKAFITHGGANGIYEAIYHGIPMVGIPLFAEQPDNIAHMKAKGAAVGVDFNTMSSTDLLNALKTVINDPFYKQNTMKLSRIHHDQPMKPLDRAVFWIEFVMRHKGAKHLRVAAHDLTWFQYHSLDVIGFLLTCVAAVIFIITKCCLFCFRKFVKTGNKEKKS

SEQ ID NO: 8382 - protein, 528 aa, Merops nubicus
MMGPRFSWFWVYACCWSAGFCGKVVVWPTDASHWINVKVLLEELVLRGHEVTVLVPSSNLLIDYEDTSSPFTFEVLQAPFTQKTLDALMEDFVNFWTNEVSNVYPWEIIWRMKEDLEVFTDLTKKICDTLLTNPQLIAKLQKAKFDVLIADPFSVGGELIAEILAIPFVYSFRFSDGNAVERLCGGLPSPPSYVPASTRGLTDHMSFVERLQNFLFYFYTDVFFLKFWREEWDGYYSNVLGRPTTLCETMGKAEIWLIRTYWDLEFPRPFLPNFEFVGGLHCQPAKPLPKEMEEFVQSSGKHGIVVFSLGSMVYNLSDEKSNMIARALRQLPQKVLWRYKGKKPETLGSNTRIYDWIPQNDLLGHPLTKAFITHGGTNGIYEAIYHGIPMVGIPMFGDQHDNIAHMKAKGAAVGLDFSTLKTQELVDALNTVINNSTYKENALRLSKIHHDQPLKPLDRAVFWIEFVMRHKGAKHLRPASHHLTWYQYHCLDVLALLFTCTAITVFISAKCCLFCCRRCGRIVKRKKE

SEQ ID NO: 8383 - protein, 218 aa, Cricetulus griseus
MVKNLTDEKANIVASALAQIPQKVVWRFEGKKPDTLGSNTRLYKWIPQNDLLGHPKTKAFIAHGGTNGVYEAIYHGIPIVGIPLFADQADNIHHLVAKGAAVRVDFNTLSTTNLLTALRTVINDPLYKENAMKLSRIHHDQPVKPLDRAIFWIEYVMRNKGAKHLRPALHDLAWFQYHSLDVIGFLLVCVAAVVFIITKCCLLCCHKTANMGKKKKKE

SEQ ID NO: 8384 - protein, 527 aa, Dinoponera quadriceps
MKVLSVLLAILVTCDQSANGFRILGVFPLHGHSHWVMNEPLMKGLAQRGHQVDVITHFPQKKPVPNYTDISLFGSLPNVRNNISATEIQAFGGLSMKHLTEIAGNNICELLAHPKIQDLIKNPPQDPPYDLVIVEVFMAPCFLAFGRHLKVPLVATVTCSFHDWLNELSGNSFNPSYVPSLFSSFGQHMNFKERMLNFLTSHLISAQILYHTEFQAEYLKKYFDMQDTAIMDLYSDISLYLVNSHYSLSGIRPLTPAIVEVGGLHVKSDNVSLAPEVQKWLDESKDGCVYFTFGSMVRIETFSKELMEEFYASFKKIAPVRVLMKVAKKEDLLPGLPDNVMTQSWFPQIAVLKHKNIRAFITHGGLMGTQEAIYYGVPMIGIPLFGDQKINIQSYERKKIAISLNSVQDVTEEKLTSALNSILKDPTYRENVQYFSKLFVDRPLSPLDTAIFWVEYIKKYGNFLQSPAMQLYWWQRHLLDVYAFLLLIVIVVLLVVMFILRKLKRLLFGSHVCTKKDSAAIKAKKNK

SEQ ID NO: 8385 - protein, 503 aa, Anopheles sinensis
MLLILIALVGVSHAANILFMSGVPSPSHYIWQRPLMWEMGKRGHNVTVLSADIEKQPPTNVTYIHLENFYSTMYNTSMREKVDFFDMASQSPIKLLGLFDEFGMNLCEAAIESEGLNFLLNYPKDFKFDLFLSDIMIGPCLPSIIMHRFKDVSYIPVTPYNAPSTAASVLGSYAYSGLVPNHVYDVPEVMSFVQRVKNFYYDAYEMILHEVYMHPEADRILRTIYPSAPSTTTFYKNVRVSFINANPIIQYKEPMMPNMIPVGGLQIQPPKPLPEDLRKVVDAAQNGFILFSLGSNARSDLLGPERIRNILSAMERLPQYQFLWKFESDESKLPVPIPKNVYIRAWMPQNDLLAHPNIKLFITHSGLLSTQEAIWHGVPVIGFPLFADQFRNINYCVEAGIAKRLTIQHFKANELVDAVKEILGEPKYATKMKQVSRLFRDQPETPLERAVWWCEWVLRNPDADLLQSRAVHLSWFRKYSYDVLSFVLGVAVLLLATSKSKIE

SEQ ID NO: 8386 - protein, 218 aa, Rattus norvegicus
MVGNLTEERANVIAAGLAQIPQKVLWRFEGKKPETLGSNTRLYKWIPQNDLLGHPKTRAFITHGGTNGIYEAIYHGIPVVGIPLFGDQYDNIVHLKTKGAAVRLDFLTMSSTDLFTALKTITNDPSYKENAMRLSRIHHDQPVKPLDRAVFWIEFVMRHKGAKHLRVAAHDLSWVQYHSLDVIGFLLACVVTVMFILKKCCLFCCQKFTKAGRKKKRE

SEQ ID NO: 8387 - protein, 279 aa, Chinchilla lanigera
MAKAEMWLIRSYWDLEFPRPTLPNTEFVGGLHCKPAKPLPKEMEEFVQSSGEHGIVVFSLGSMVHNLTEERANVIALALAQLPQKVIWRYSGKKPDTLQPNTQLYEWIPQNDLLGHPKTKAFVTHGGANGIYDAINHGVPMVGIPLFGEQHDNIAHMEAKGAAVVLDFMTMSTADLVNALKEVMNNPSFKENVMWLSTIHHDQPMKPLDRAAFWIEFVMRHKRANHLRPLAQNLTWYQYHSLDVIGFLLACVVTVTLLVTKCCFFCYQKIVKTGKKKKE

SEQ ID NO: 8388 - protein, 244 aa, Mesocricetus auratus
  MOD_RES (178)..(178): Any amino acid
MPSLQEIEDFLQSSGEHGVVVFSLGSMVGNLTEERANVIAAGLAQIPQKVLWRFEGKKPDTLGSNTRLYKWMPQNDLLGHPKIRAFITHGGTNGLYEAIYHGVPVVGIPLFADQFDNVVHMKTKGAGVRLDILTMSSTDLLNAVKTVITDPSYKENVMQLSRIHHDQPVKPLDRAIFXVEYPMRNKGAKHLSVAVHDLTWFQYHSLDVIGCLLACVITVIFIITKCCLFCCQKFAKAGRKKKRE

SEQ ID NO: 8389 - protein, 486 aa, Erinaceus europaeus
MPMKGISVLLLLQVACYFSSGKCGKVLVWPTEYSHWMNIKTILDELAQRGHEVTVLTSSASILIDPNKKSAIKFETYPTSVSKDEFNNVIMEVIHTWIYKMPKDAFWSHFSILQEQLWKFHVVVYKLCREAVLNKNLMMKLQESKFDLVLSDPVSPCAELLGELLNVPFMYTLRFTPGYELERHQGGMPLPPAYVPVVLSELSDHMSFMQRVKNMIYVLYFDFWFQFVNEKLWDPFYSEVLGRPTTLHETMKKAEMWLIRTYWDFEFPRPFLPNFEFIGGLHCKPAKSLPKVLWRFEGKKPDTLGKNTRLYKWLPQNDLLGHPKTKAFITHGGTNGIYEAIYHGVPMVGIPLFADQPDNIAHMKAKGAAVGLNLDTMSSKDLLSALKTVINDPSYKENAMKLSRIQHDQPVKPLDRAVFWIEFVMRHKGAKHLRPAAHDLTWVQYHSLDVIGFLLACVAATVYIITAGCLFCFRKCTKSGKREKRD

SEQ ID NO: 8390 - protein, 524 aa, Branchiostoma floridae
MLTGLHLSLAVAAILSQQVQAADILVATMTYTSAWMDVAKIAEVLASRGHIVTVLAHASQKSDLMRKLPTLRYETFGDPEKPPSVKEFSTTIPQKMAFSSPGVLAQIALGSTLASAMLDFSNEMLSDKQLLTKLKNSHYDVVLTYPMTSCGPLVAQYLDLPLVCTMRSLPSGQDVRATGVPYPLAYVPTVGSGLSDRMTFLQRVKNVLVYFAFSTAGQLVFDKGYDDLAKRTIGDNFTMSAALARTDVWLYQSDVMFDFPKPMMPNMVSIAGHVADDVKPLSEELEKFVQSSGDDGVVLVTFGSMVAAMPAEKADMLAAAFARLPQKVVWRYAGTPPPSLGSNTKTMEWVPQNDLLAHPKTKAFVSHCGYNGVAEAMYHGVPLVGMPLFAEQFDNIARMVARGMAVSLDIHTVTSEEVSQAITSVISDPSYKEKTNLISTHLRDQPQSPMERAVWWIEHVIKHGGLPHLRSRAPELPFYQYYLLEVIALIVAVISAVLLSCWKCCSFACRMCKRSMTTTKLKIN

SEQ ID NO: 8391 - protein, 445 aa, Bos taurus
MSMKRLSLLLLLQLTCYFSGGSCGKVLVWPVEFSHWLNIKTILEELVTRGHEVTVLISSASTIPNSSKPSTMKFETFPVSLTKSDYENFMERILEELTYVAKDSFWSYLSTVKNVFWEFFDIALRMCEDAVSNKKLMTKLQESRFDILIADAVGPCGRPTTLSETMGKADMWLIRSYWDFSFPRPRLPNVEFVGGLHCKPAKPLPKEMEEFVQSSGENGIVVFSLGSMVSNMSEDRAKVIASAFAQIPQKVLWRYDGKKPDTLRPNTRLYKWLPQNDLLGHPKTKAFITHGGSNGVYEAIYHGIPMVGTPLFADQADNIARMKSKGTAVRLDLETMSTRDLLNALKEVINNPSYKENVMRLSAIQHDQPMKPLDRAVFWIEFVMRHKGAKHLRPAIHDLTWFQYHSLDVIGFLLACVATAIFVITKCCLFCCLKFAKLGKKEKRD

SEQ ID NO: 8392 - protein, 533 aa, Parus major
MAMKTTGSKKYLQLLLFQVALLGPVFCGKILVWPTEGSHWMNMNVIIQELIRRGHSFTILVSNATLYIEPRPKATEKFETYYVPFKKDVPENLINGIVDLWLNNRPTVLTFWQFYKELGRLSVGWQEMNKMMCDAVLTNQELMARLQGSGFDLMLSDPVTPCGELVAVKLGIPFVYSLRFSPAFTLERHCGKIPTPPSYTPAALSELTDHMSFGERVKNFVSYHLQDYVFQSYWGHWDIYYSKALGRPTTLCETMGKAEIWLIRTYWDFEFPRPYLPNFEFVGGLHCQPAKPLPKEMEEFVQSSGEHGVIVFTLGSMVHNLSDERSNVIAKALSQLPQKVLWRYKGKKPETLGSNTRIYGWIPQNDLLGHPLTKAFITHGGTNGLYEAIYHGIPMVGIPMFADQHDNIAHMVAKGAAVQVDFNTMKTQDLVDALNTVIYNSTYKENALKLSKIQHDQPVKPLDRAVFWIEFVMRHKGAKHLRPAAHHLTWYQYHSLDVLAFLFTCTATIVLILFKCCLCCCRRCGRIAKRKKE

SEQ ID NO: 8393 - protein, 204 aa, Fukomys damarensis
MSLAWDLKQVLWRFEGKKPDTLGSNTRLYKWLPQNDLLGHPKTRAFVTHGGANGVYEAIYHGIPMVGIPLFGEQHDNIAYMTDKGAAVNVNFLTISSTELLNALKMVLNSPSYKENAMWLSTIHHDQPMKPLDRAAFWIEFVMRHKGAKHLRPLAQNLTWYQYHSLDVIGFLLAGVVTITLLVIKCCFIISQKFLKMKRKKKRE

SEQ ID NO: 8394 - protein, 238 aa, Colobus angolensis
MEEFVQSSGENGIVVFSLGSMISNMSEESANMIASALAQIPQKVLWKFDGKKPNTLGSNTRLYKWLPQNDLLGHPKTKAFITHGGTNGIYEAIYHGIPMVGIPLFADQHDNIVHMKVKGAALSVDIRTMSSRDLLNALKSVINEPIYKENAMKLSRIHHDQPMKPLDRAVFWIEFVMRHKGAKHLRVAAHDLTWIQYHSLDVIGFLLACVATVIFIITKCCLFCFRKLAKTGKKKKWD

SEQ ID NO: 8395 - protein, 280 aa, Microcebus murinus
MKKADMWLIRTYWDFEFPRPLLPNFDFVGGLHCKPAKPLPKEMEDFVQSSGENGVVVFSLGSMLSNMTEERANVIASALAQIPQKVLWRYDGKKPDILGPNTRLYKWLPQNDLLGHPKTKAFITHGGANGVYEAIYHGVPMVGIPLFADQPDNVAHMKAKGAAVRVDFNTMSSTDLLSALRTVINDPMYKENAMKLSRIHHDQPVKPLDRAVFWIEFVMRHKGAKHLRVAAHDLPWFQYHSLDVLGFLLACVATAIFVIMKCSMCFWWMIATAGKKAKRE

SEQ ID NO: 8396 - protein, 488 aa, Sus scrofa
MNKMLMKQFSLLLLLQLTCYFSSGRCGNVLAWPVEYSHWINMKAILEELVTRGHEVTVLISSASIFIDPSKPSAIKFEIYPASVTKEEYENFFMHFFGEWTYLEKNSFWTYFPAMIRIIRKYFEISLKFCKDLVSNKKLMTKLQESRFDVILADAVGPGGELLAEILNIPLVHSLRFYPGYAMEKHGGKLPFPLSYVPIIMSELSDHMTFMERVKNMIHALYFDFWFQTFNEKKWNQFYSEALGRPTTLFETMGKADMWLIRNYWDFDFPRPLLPNFEFIGGFHCKPAKPLPKVLWRYNGKKPDTLGPNTRLYKWIPQNDLLGHPKTKAFITHGGTNGIYEAIYHGVPMVGIPLFADQPDNIAHMTAKGAAVRLDLKTMSRTDLVNAVKQVINNPFYKENVMWLSTIQHDQPVKPLDRAVFWIEFVMRHKGAKHLRPAAHDLTWYQYHSLDVIGFLLACVATAAFALTRGCLFCCRKLANAGKKAKRE

SEQ ID NO: 8397 - protein, 532 aa, Heterocephalus glaber
  MOD_RES (146)..(146): Any amino acid
  MOD_RES (347)..(347): Any amino acid
MMSMKWISALPLLQMSCYFNSGSCGKVLVWPMDYSHWMNIKNILEELIQRRHEVIVLRPSSFIFIDANSSSGIKFETLTTSINRDEWGKYFAQFITTWMNIGSIDSCIAYFPEGENIFKEFSDTWHNLCKEIVSKKIIMKKLQESXVFDVLLADAIGPCGELVAELLKIPFVYTLRFSPGFQLEKFGGGLMLPPSYVPVVMSRLSGQMTFMERVKNMICMLYFDFWLETFNEKKWNLLYSEVLGKPTTLYETVAKAEMWLIRSYWDLEFPHPTLPNFDFVGGLHCKPAKPLTKEMEDFLQSSGEHGVVVFSLGSMVSNMTKERANVIASALAQIPQKVLWRFDGKKXNTLGHNTQLYKWLPQNDLLGHPKTRAFVTHGGANGVYEAIYHGIPMVGIPLFGEQHDNIAHMVAKGVAVKVEFITLSSTELLNALVRVLNNPFYKENAMWLSTIHHDQPMNPLDRAVFWIEFVMLHKGAKHLRPLTQNLTWYQYHSLDVIGSLLACVATITFFVIKCCLFCSQKFVNVRKKQKRE

SEQ ID NO: 8398 - protein, 487 aa, Bos mutus
MNMMAMKRLLLLLLLQLTCYFSSGSCGKVLVWPVEYSHWMNMKIILDELVMRGHEVTVLTSSASILIDPNKPSAIKFENFSVSLTKDDFEDALKNFVGNWTDLTNSFWTFPLLLQSLFDEYSDLTLKICKELISNKKFMTKLHESRFDVVLADTVGPCGELLAEIFKVPLVYSVRFTPGYSIERKSGKLPYSPSYVPVILSELSDHMTFMERVKNMIYVLYFDFYFQMLNEKKWDQFYSEVLGRPTTLLETMGKAEFWLFRSYWDFEYPCPLLPNVEFIGGLHCKPAKPLPKVLWRYDGKKPDTLGPNTRLYKWVPQNDLLGHPKTKAFITHGGTNGIYEAIYHGVPMVGLPLFAEQPDNINRVKAKGAAVRLNLETMSKTDFLNALKQVINNPSYKRNAMWLSTIQRDQPMKPLDRAVFWIEFVMRHKGAKYLRPAAHKLTWFQYHSLDVIGFLLACVATAVFVITKCFLFCCRKFAETGKKRKRE

SEQ ID NO: 8399 - protein, 348 aa, Camelus ferus
MYEELPYHETGFTQSEHGVYSTLFYCHKRLENWLLYTLIDMLYSYYIFPEWDAYYSNVLGKPTTLCETMGKAEMWLIRTYWDFEFPQPYLPNVEFVGGLHCKPAKPLPKDLEEFVQSSGEDGVVVFTLGSMIRNLTEEKANMIASALAQIPQKVLWRYTGKKPDTLGANTRLYEWIPQNDLLGHPQTRAFITHSGTNGVYEAIYHGVPMVGIPMFGDQHDNVARVKAKGAAVEVDLPTMTSSDLLHALKEVINNPSYKENAMKLSRIHHDQPVKPLDRAVFWIEFVMRHKGAKHLRPALHDLTWYQNHSLDVIGFLLACVATAVFVITKCCLFCCLKFGKTTKKKKRE

SEQ ID NO: 8400 - protein, 525 aa, Cynoglossus semilaevis
MEQQQHLFVCILLAFCLTSSTNGGKVLVWYTEASHWINMKHVLETLVDRGHAVTVLMLFMDNKDSKFKYETFNVSFPLEEIEKFLEDYLHFSMYEMDQLSYLQIYIRHIELAKMDLYYNLKYLDGIIKSEFMMKKLKDENFDVLLADPIYPGSDLVADILGIPLVFTLRFSLVNNWERHCGQRPAPPSYVPGAMSKLTEKMDFSERVWNFGFYLLNDLMYQHFFWKDIDKYYSDVKGTPTSGCEMMGKADFWLIRTYWDFDSPHPILPNFKYVGGIHCKPAKPLPKHIEEFVQGSGEHGVIVFTFGSMINNITREKANMIASALAQIPQKVLWKYKGETPETLGANTRLYDWIPQNDLLGHPKTRAFVTHGGTNGIYEAIYHGVPMVGIPMFADQPSNIIQLKARGAALILNLNFMTTEDFRDALTIVINDKSYKENAMQLSRIHHDRPMSPRDEAIFWIEYTMRNKGAKHLRVQAHELTWFQYHSLDVLVFLLSIVLLITLLFIKACSLCFRRCCGSKRKTKRE

SEQ ID NO: 8401 - protein, 411 aa, Loxodonta africana
MSMKWISVLLLIQLSCCFSCGTCGKVLVWPPEYSHWMNMKTIVDELIQRGHEVTVLTPSASVLIDPNKPSAIKFEVYPTSLTEDEFEYVFMKLVRRWTNEVPKDTFWTCFSKKWDQFYSEVLGRPTTFSETRGKAEIWLVRNYWDFQFPRPFLPHFHFVGGLHCKPANPLPKEIEEFVQSSGKHGVVVFTLGSMVSNLTEERANMIASALAQIPQKVLWRFDGKRPDTLGPNTWLYKWIPQNDLLGHPKTKAFITHGGANGIYEAIYHGIPMVGIPLFADQPDNIAHMKVMGAAVRLNMDTMTSTDLFNALKTVIYDPSYKENAMRLSAIHRDQPVKPLDRAAFWIEFVMRHKGAKHLRPAALSLTWYQYHSLDVIGFLLACVAIVSFLVIKCCLLGYQKFYKTRKKKKRE

SEQ ID NO: 8402 - protein, 1331 aa, Chelonia mydas
MAPSSAPMGAAGAVPVDGAVCKATWLHLRLGAREWTCHCFWEPLETDQDPNAASLLDVFNYWLKSPDAKKRKAVPNGPPAKKSKKESSSSSDESSSEEDEKTTAKKPATKSAPVPKVIAKAAAPAKKAESSSEDSSDDSDSEEEEKKPAQKVTKAQAKPAATKTQPQKKAKSSSSSDTSSSEDERPKKQLLKPVAAKTAAKSAGSKAACNAANGKAESSSSSSSEDSDKEKAASAKAVPKKTPLPKPAAIQVPSGKGRAPAKESSSSEDSSDSSEDEKPASKSKPKPGPYSAVPPPQVTEPRKGKAKPSVAKAPGKKAESSDSSDSSSDSSDEMEQTPKKGTTAKASLAKKKPTPTPTAVTIKKGGSSSDSDSDSSSEEEKVVTKLTAKSLAAKGPAKPAKVPAKSGQAKKGSSSSSDSSDSDSSEDETPAKPAVKPAPPAAKKPPAVAKKAQSSSDSDSSSSSSEEEKKAPPAKPASKTAKPASKPCTLVPKASSSDSDSSSSEEEQSKPAVKPASKSPGGSKACAGKKAAAASSSSSSSDSSSDDDKKSRTAGTPVAGLKPGKGGQNNSSLVKEKPKASSTPAAKSPATKKSEPKPAGGSESSSESSCDEKGKANGAVPFRRVREEEIEVDSRVANNSFDAKKGAAGDWGEKAHNVLKFTKGKSFRHEKTKKKRGSYCGGAISTQVNSIKFEIQKWMDGGLDTSLPMVRALGPKFPVNCMHNIVSTFCLVTFALVVCYSITTDVFFSLVATLQWQNYAYCFSFCKLVITTLVTFLRATGEAATRLLRHSNCAKAQSPSTEMRLPPHPVAVLLMVATFSLDCCHGAKVLVMPTIVFDSHLRVFMRVAEALNDRGHNATLLLHEGRESEPFLPGLRVQTYRGIFSMESADAWVQEKIKRVFQGKKTSLEIFSFLEKYLENCDLVLGDAALLQQLRGEGFDLFLVDPNEMCGFILAHLLGIKYAVISTGFWYPAEIGATSPVAYVPEFNSLMTDRMGLVGRTWNLLVYMITRIATKLVILPKFDRLMQKHGVEPQKSMLELVYGTSLFFLCNDVVLDFPRPTLPHVIFTGGILAEPEKPLPVGLRLWVEAADAGVVVVSFGIGIRALPSNLVEKMAGAFARLPQRVVWRYFGQKPNNLGENTLMMEWLPQNDLLGHPNVKAFVSHCGMNGIFEAIYHGVPVVGFPFYGDQFDIMTRVQAKGMGILMDWSRVSEEDLYQAIVTVLSKPSYNKAAKQISALHRDTPMHALNRTVYWLEYILRHDGAPYLRPAVYDLSFYEYFCLDILALFLLCLAGAAYALSKAIVWYRGKRASPVHLNGNCLNGHLVEGKKAQ

SEQ ID NO: 8403 - protein, 529 aa, Cyphomyrmex costatus
MKVLLSVVFVILAFDQIASSYRILGIFPLNGKSHWNMQEALMKELARRGHQVDVVSHFPMKKPILNYNDISLKGSMPQVTNNMTATQLQIFASSTPSMSAFVQMTGNSICALLNHPKIQELIKNPPQDPPYDIVILELFTAPCYMAFGRYLKVPMVGTVASVFHDWLSEVSANPLNPAYIPNMFSAYSQHMNFKERLSNFLLTHYLSWQFHYYTNSQLKLVNEHFGMNLPHIKDLYNDISLYLVNSHHSLNGIRPMTTNVIEVGGMHLSNDDDPMSPELQKWLDESKDGCIYFSFGSMVRIETFSKELLQQIYASFEKIAPVRVLMKVAIKDDLLPGLPKNVMTQSWFPQIAVLKHKNTRAFITHGGLHSTQETIYCGVPMIGIPLFGDQRVNIQNYVNKKVAISLNSITDVTEEKLTSAIKNILKDSTYRENVQKLSKLFLDRPMSAMDTSIFWVEYVAKYGNVLQSPAIKLNCWQRNLIDIYVFIFVVIIIVLYVALFILRKLKKLLFGSHACAKKDNATMKLKKNK

SEQ ID NO: 8404 - protein, 403 aa, Bactrocera dorsalis
MAGLTTGHLLLLLGLCCTLVQASYPLKILGLFPHPGISHFHFFHPLMRGLAEKGHDVTVLSHFPDKSPPARYRDLPLTRHETLTNSVDLKFFETQHFYQHFVEFYMLHEWGKDACNLTLRSDALAQVLRQRQHFDVIIMEQFNSDCMTAVAHQLKAPFIGLSSCAMMAWHYDRVGMPMVPSVMPTLFMGQSEDMTFGARLANWFTDHTMRFLYDFYTTPTTDAMVRHKFGHDMPSVGELAKETSMLFVNQHFSLSGVKPLPPSVIDLGGIHIQKAKPLDPELQKFLDNAEHGVVFISWGSMIRADTVPPAKREAIVRAVKRLKQRVIWKWENSTLANKPDNLYVSKWLPQRDILCHPNVKVFLSHGGLMGSSEAAYCGVPVVGTPMYGDQFMNAAALKYRGMG

SEQ ID NO: 8405 - protein, 492 aa, Sorex araneus
MVFIMDHMMPKKFVQLLVLNLILTEIVLSGNVLIWPTDGSHWLNIKIILEELVKKNHNVTVLAASTTLFIKSNPDSSVNFQEVPVSFNNNNIDDLIEHMIALWLDHRPTPLTLWRFYKELGNLLDTFFRINIQICDGVLHNLELMTKLQRGGFDVLIADPVTICGDLVALKLGIPFIYTLRFSPASTVERHCGKIPAPVSYVPAALSELTDQMTFGERVKNTISYHLQDYIFQSYWGEWNSYYSKILGRPTTLCETMGKAEIWLMRTYWDFEFPRPYLPNFEFVGGLHCKPAKPLPKVLWRYKGKIPDTLGANTRLFDWLPQNDLLGHPKTKAFITHGGTNGIYEAIYHGVPMVGVPMFADQPDNIAHMKAKGAAVEVNINTMTSADLLNALRTVINEPSYKENAMRLSRIHHDQPVKPLDRAVFWIEFVMRHKGAKHLRPAAHDLTWVQYHSLDVIGFLLACVAAALFLVTKCCLFTCKKFGKTGKKKKRD

SEQ ID NO: 8406 - protein, 524 aa, Drosophila grimshawi
MFSLRLSSALVLIFMLPHLLEGARILAIFPFAGPSQYINVLPYLKGLAARGHEITSVNAFPQKEPVKNFRDIPVPEVIESYEELITELSNEMNLWKENNFCNAFFIGTTKSVLRNAQVQRELLQPGKDHYDLIIVEVLRTDALYGFAAHFNAPLIGFSTFGTDWNIDETVGNTSPLSFTPLPTSGFTDHMTFGERVRNFLQTSIAWLNWKLVHLPLQVKLYEQYFPHIAKSKPLMEVSKNFSLMLLNQHFSLSYPRPHVPNMIEVGGLHISHKPAPLPKSIEDFVVGAGSAGVIYFSLGSNIKSNSLPLERRQMLLQVFASLPQRVIWKFEDDQLVNKPANVLIGKWFPQPDILAHPNVKLFITHAGLLSTTESIHHGKPVLGLPFFYDQFQNVERAKRAGFGLSLDHSKMTALELKQTIERLIGEPQFTARAQQISARYHDKPMGPQETAIWWTEYVLRHKGAPHMRVAAQDLSFIAYHSLDVIGLLLAVATLILAAISFVLFKLLRCLRGQSGTSTQKLKNH

SEQ ID NO: 8407 - protein, 546 aa, Austrofundulus limnaeus
  MOD_RES (249)..(249): Any amino acid
  MOD_RES (491)..(491): Any amino acid
MSLPSSLLLLLGLITWSPSSTWGAKVIVVPPIMFESHLYIFKTLATALLQEGHESHFLVSEGREVPPSPHYHLQRYPGIFNSSTADNFLQSKVSNIFSGRLTFLELFDILDHYSQNCDAVVGNVEVMNRLKEAKFDLLLVDPNEMCGFVIAHILNVQYAVFSTGLWYPAEVGAPAPLSYVPEFNSLLTDRMSLMERIANTAVYLVQRFGVHFIVLPKYDRIMKKHGVKPQVAMADLVQGSRLWMLCTDXALEFPRPTLPHVVYIGGILTKPPSPLPQDFELWVRDTTEHGFVVVSFGAGVKYLSQDIAHKLAGALARLPQRVIWRFSGIAPSNLGNNTKLVDWMPQNDLLGHANTRAFLSHGGLNSIYEAMYHGVPVVGVPLFGDHYDTMTRVAAKGMGIMLHWKYMTEDDLFKALTSVIEDTRYRQQAHLLSSIHKDQPGHPVTRAAYWISYILRHNGANHLRSAVYNVSVYQYFLLDVVFTLAAGLALXGFLLSRLVRLLKGKHSRGGATRDDGTLTNGHCHSGSLANGKHKRNGSLKSEKKLN

SEQ ID NO: 8408 - protein, 541 aa, Vicugna pacos
MKSYTPYFMLLWSAVGIAKAAKIIIVPPIMFESHMYIFKTLASALHERGHRTVFLLSEGRDIAPSNHYSLQRYPGIFNSTTSDAFLQSKMRNIFSGRLTAIELFDILDRYTKNCDMMVGNRALIQGLKKEKFDLLLVDPNDMCGFVIAHLLGVKYAVFSTGLWYPAEVGAPAPLAYVPEFNSLLTDHMNLLQRMKNTGVYLISRLGISFLVLPKYERIMQKYNLLPEKSMYDLVHGSSLWMLCTDVALEFPRPTLPNVVYVGGILTKPASPLPEDLQRWVNGANEHGFVLVSFGAGVKYLSDDIANKLAGALGRLPQKVIWRFSGTKPKNLGNNTKLIEWLPQNDLLGHSNIKAFLSHGGLNSIFETMYHGVPVVGIPLFGDHYDTMTRVQAKGMGILLEWKTVTEGELYEALVQVINNPSYRQRARKLSEIHKDQPGHPVNRTVYWIDYILRHNGAHHLRAAVHKISFCQYFLLDVAFVLLLGAALFYFLLSWVTKFIYRKIKSLWSRNKHSTVNGHYHNGILNGKYKRNGHIKHEKKVK

SEQ ID NO: 8409 - protein, 311 aa, Carlito syrichta
MLMARLQKGGFDVLVADPVTICGRPTTLCEIMGKAEIWLIRTYWDFEFPRPYLPNFEFVGGLHCKPAQPLPKEMEEFVQSSGDNGVVVFSLGSMVKNLTEEKANLIALALAQIPQKVIWRYKGKKPVTLGNNTRLYDWIPQNDLLGHPKTKAFITHGGTNGIYEAIYHGVPMVGVPMFADQPDNIVHMKAKGAAVDVNMNTMTSADLLSALRTVIYEPSYKENAIRLSRIHHDQPVKPLDRAVFWIEFVMRHKGAKHLRVAAHDLTWFQYHSLDVIGFLLACVATMIFVITKCCLFSCQKFGKTRKKRKRE

SEQ ID NO: 8410 - protein, 540 aa, Stomoxys calcitrans
MQHNFELKILPFLKCLKLLLLLGYVSNQPTYAAKILGLFPHASESHFMVMRTFMMELARRDHNVTIYSSHRLDDRLDNLKEIIIEPEFPFWKEVQKQAGAKDLLELSKLSDEKLSKYLAQAGAALMDNFLDNYQVKDLLSLQPDDFDYDLIIVDMFYTESLLAMGYYFRTPVVAIVSKDFSDYMELVQEMLVPTACLPYDLENYDANLGFWQRLNNVKQCVNRRNSFIEDHYGSQEKIIKKHFHKIQGGLPSIMDLQSNLALLLVNNYYPLAAPKPLVPNIIPVGGLQIRAPRELPWQIRRFLDEARSGVVYINMGDEQLCGDIPKEKLEALLHVFNKREERFLWTCHDIQKMEGLPKNVMLQHLVPQTDILAHPHVKIFITNGDLLALQESIVRHVPIVGIPMFKNELENVIMAEKLQIGLRIDYANLTETSLSWALDSMAYKEFYILNIRDISKIFRDRPLGGLANALFWLDYVVRYGNQPLRTNGIGMPLGEMHLNDLMIYNFMITLLVLASLVGLYFVGLFVYRKRQTEKMFSKLN

SEQ ID NO: 8411 - protein, 530 aa, Chinchilla lanigera
MSMKRISALLLLQLCCYFSFGSCGKVLVWPMEYSHWMNMKIIVEELIQRGHDVTVLIPSSFIFVDVNASSAIKFETFTASMSRQQLEDFYIRFITKWMNIESVDTCLAYSPVMEDILREYSAVWENVCKEAVSNKKLVTKLQASKFDVLLADPVAPCGELVAELLKLPFVYSLRGSPGFQVEKAAAGLLFPPSYVPVILSRLSGQMTFMERVKNMICMLYFDFWFETFNEKNWSKLYSETLGKPTTLYEKMKQADMWLIRSYWDLEFPRPTLPNVDFVGGLHCKPAKPLPKEMENFVQSSGEHGVVVFSLGSMVSNMTEERANVIASALAQIPQKVLWRFDGKKPDTLGPNTRLFKWLPQNDLLGHPKTRAFITHGGANGVYEAIYHGIPMVGIPLFAEQFDNIAQMEAKGAAVKLEFKSLSTTDLLNALKTVINNPFYKSNAMKLSTIHHDQLMKPLDRAVFWIEFVMRHRGAKHLRPLAQNLTWYQYHSLDVIVFLLALVAIIIFLVLKCCLFCFQKFAKVGKKKKRE

SEQ ID NO: 8412 - protein, 696 aa, Tyto alba
MLNHLLLFQFALLGPVFCGNVLVWPTEGSHWLNVRIVIEELTRRGHSVTILVSNASLFIKPRAEATEKFEVYNVPFKKDTVENLIEEVVALWLNNRPTTLTFWQFYKELGKLSKNWHWMNRLMCDAVLSNRELLAHLQGSSYDLLLSDPVTLCGDLLALKLAVPFIYSLRFSPASTVERHCGKIPAPPSYTPAALSELTDRMSFSERIKNIVSYHLQDYVFQSYWGEWDIYYSKVLVLVWPADNSHWLNMEYILQELVVRGHEVTVLLPSCFLILNPAEPSPFRFEVVEVPITKKEMATLLEEALYFWFYQESALPVWVSLYKIAQLVYKLENVTKIICDEVLKNEALLERLRTSTFDVLLADPLAPSGELFAEKLGIPFVYTIRFSIGNTVERLCGTLPAPPSYVPATLSRLTDRMSFLERLKNIFTFIVQDIMYHYLLWGSWDQYYSDVLGRPTTLCETMGKAEIWLIRTYWDFEFPRPFLPNFEFVGGLHCQPAKPLPKVLWRYKGKKPETLGSNTRIYDWIPQNDLLGHPLTKAFITHGGTNGIYEAIYHGIPMVGIPIFADQHDNIAHMRAKGAAVELDFSTLKTQDLVDALNTVINNSTYKENALRLSKIHHDQPVKPLDRAVFWIEFVMRHKGAKHLRPAAHHLTWYQYHCLDVLAFLFTCTAIAAFILVKCCLFCCNRCGRIAKRKKE

SEQ ID NO: 8413 - protein, 359 aa, Bison bison
MNMMAVKRLLLLLLLQLTCYFSSGSCGKVLVWPVEYSHWMNMKIILDELVMRGHEMLNEKKWDQFYSEVLGRPTTLLETMGKAEFWLFRSYWDFEYPCPLLPNVEFIGGLHCKPAKPLPKEMEEFVQSSGENGIVVFTLGSMVTNVTEERANMIASALAQIPQKVLWRYDGKKPDTLGPNTRLYKWVPQNDLLGHPKTKAFITHGGTNGIYEAIYHGVPMVGLPLFAEQPDNINRVKAKGAAVRLNLETMSKTDFLNALKQVINNPSYKRNAMWLSTIQRDQPMKPLDRAVFWIEFVMRHKGAKYLRPAAHKLTWFQYHSLDVIGFLLACVATAVFVITKCFLFCCRKFAETGKKRKRE

SEQ ID NO: 8414 - protein, 530 aa, Propithecus coquereli
MAVKLASALLLIQLSDYFSSGTCGKVLVWPTEYSHWMNMKTILDELVQRGHEVTVLTHSASILIDPKKAASIKFEAFPTSLTKSDFEDVAIQLVHKWTYDLPKATFWSYFSQVQEIMWTFSEIMIKFCKDAVSNKKFMTRLQESKFDVVLADAIGPCGELLAEILQTPMVYSLRFSPGYTFEKYGGGLLLPPSYVPVAMSELSDQMTFMERVKNLIYMLYFDFWFETFNMKKWDQFYSEVLGRPTTFYETMKKADMWLIRTYWDFDFPHPLLPNFDFIGGHHCKPAKTLPKDMEDFVQSSGENGVVVFSLGSMVSNMTEERANVIASALAQIPQKVLWRFDGKKPDTLGPNTQLYKWLPQNDLLGHPKTKAFITHGGANGVYEAIYHGVPMVGIPLFADQPHNIAQMKAKGAAVRLDFETMSSTDLCNALKTVINDPIYKENAMKLSRIHHDQPMKPLDRAVFWIEFVIRHKGAKHLRVAAHDLTWFQYHSLDVIGFLLACVATVIFIITKCCLFFCRMFATAGKKKKRE

SEQ ID NO: 8415 - protein, 744 aa, Parus major
MAMKTTGSKKYLQLLLFQVALLGPVFCGKILVWPTEGSHWMNMNVIIQELIRRGHSFTILVSNATLYIEPRPKATEKFETYYVPFKKDVPENLINGIVDLWLNNRPTVLTFWQFYKELGRLSVGWQEMNKMMCDAVLTNQELMARLQGSGFDLMLSDPVTPCGELVAVKLGIPFVYSLRFSPAFTLERHCGKIPTPPSYTPAALSELTDHMSFGERVKNFVSYHLQDYVFQSYWGHWDIYYSKALADNSHWLNMEHILQELVVRGHEVTVLLPSCFLIVNPTEPSPFQFEVIEVSITKKEMADLMEEILYFFFYEERELPIWKSAYKIAQKTLQMKNITKIICDGVVKNEALMERLRASAFDVFLADPLFPSGELVAEKLGIPFVYTFRFSMGNTVERICGTLPAPPSYVPTTLTGLTDRMTFWQRLKNFLSYALQDFMFHYFWRAEWDGYYSNVLGRPTTLCETMGKAEIWLIRTYWDFEFPRPYLPNFEFVGGLHCQPAKPLPKEMEEFVQSSGEHGVIVFTLGSMVHNLSDERSNVIAKALSQLPQKVLWRYKGKKPETLGSNTRIYGWIPQNDLLGHPLTKAFITHGGTNGLYEAIYHGIPMVGIPMFADQHDNIAHMVAKGAAVQVDFNTMKTQDLVDALNTVIYNSTYKENALKLSKIQHDQPVKPLDRAVFWIEFVMRHKGAKHLRPAAHHLTWYQYHSLDVLAFLFTCTATIVLILFKCCLCCCRRCGRIAKRKKE

SEQ ID NO: 8416 - protein, 531 aa, Oryctolagus cuniculus
MSMKHSSVLLLLLQLSCCFSSGSCGKVLVWPMEYSHWMNMKTILDALVQQGHAVTVLRSSASVLIDTKNESGIKFETFPTTSTKEEMEAFFMYWIKTLINDVSREKYWEYFPLWHKFFLEYSNTYENLCKDLVLNKKVLAKLQESRFDVVLADAIAPCGELLAELLEVPLVYSLRFTPGYTYEKYSGGLLFPPSYVPIIGSNLSGKMTFMERVKNTLWMLYFDFWFQTFDEKRWDQFCSETLGRPVRFSELVGKAAMWLIRSYWDLEFPRPLLPNVEFVGGLHCKPAKPLPKEMEDFVQSSGEEGVVVFSLGSMVSNMTEERTNVIATALAQLPQKVLWRFDGRKPETLGPNTRIYKWIPQNDLLGHPKTKAFVTHGGANGIYEAIHYGIPMVGLPLFGEQPDNIAHMTAKGAAFRLNWKTMSSADLFNALKTVINDPSYKENVMKLSRIHHDQPMKPLDRAVFWIEFVMRHKGAKHLRVAAHDLTWFQYYCLDVIGFLLACVTITTYVVIKFCLFAYQKIITTGNKIKRD

SEQ ID NO: 8417 - protein, 530 aa, Nannospalax galili
MSVKLSSVLLLTQLICYFRSGTSGKVLVWPTEYSHWINVKMILDELVERGHEVTVLTSSASILIDPSKPSTIKFEIYPTSLSKDDLANMFLKWITEWMHDFGKYSFWTFYSNIQKSFNEYSDVVENFCKAVVRNKGLMKKLQESRFDVVLADAFGPCGELLAEILKIPFVYTLRFCPGYTYEKYSGGLSFPPSYVPMVLTGLTDHMTFVERVKNMMYVLYFDFWFQTFNEKKWNQFYSEVLGKPTKLSELMGKADMWLIRTYWDLEFPRPFLPNSEFVGGLHCKPAKPLPKEMEDFVQSSGEHGVVVFSLGSMISNMTEEKSNVVASALAQIPQKVLWRFDGKKPDTLGSNTRLYKWMPQNDLLGHPKTKAFVAHGGTNGMYETIYHGIPVVGIPLFADQHDNIARMVAKGAAVRLDYSTLSTTDLLTALRTVINDPSYKENAMKLSRIQHDQPVKPLDRAVFWIEYIMRHKGAKHLRPALHDLNWFQYHSLDVIGFLLACGAAVVFIITKFCLFCCHKVAKAEKKKKRE

SEQ ID NO: 8418 - protein, 523 aa, Camponotus floridanus
MKLLSILFAILICDQVVDAYRILGIFPLNGKSHWIMQEELMKGLAKRGHQVDVVTHFPQKKPISNYTDISLAGSLPSIMNNMTATRIKAVSVISIGSLVHTTGIEVCQLMDHPKIQELIRNPPQNPPYDIVITELFMAPCYLAFGRHLNVPIVATVASVFHDWLNEVSGNPLNLAYIPSFFSTYTQRMSFTQRVANVILSNYISAQIHYQTNSQLEFVKKHFDIDVPHIKDLYRDIALYLVNTHHSLHGIRPMTTNVIEVGGVHLKDDDPLPPEVQKWLDESKNGCIYFTFGSMVRIETFPKEIIEQFYASFEKIAPVRVLMKVAKKEDLLPGLPKNVMTQSWFPQISVLKHKHTRGFITHGGGLGTQESIYCGVPMIGIPLFGDQHINIQNYVNKKVAVAFESIYDVTEEKLTSALNKILRDPSYYENVQRLSKLFVDRPMSALNTSIFWIEYIGKHGNVLQSPAIDLYWWQLNLLDVYAFIVAVIIIALCIVLFVLRKLKNFLFGSPARKDSAAIKLKKNK

SEQ ID NO: 8419 - protein, 529 aa, Chinchilla lanigera
MSRIMKTILLLLHLCCYFSAGRCGKVLVWPMDYSHWLNIQVILTELVQRGHEVTVLRPSSSVFLYLNSPSDIKFETFLTSSNTEDMKNFFERTLDTWIYTVPKDTYWKHFPRLQGLLWEFSDVYYNITEGAVRNKKLMTKLQDSKFDVLLADAIFPGGDLMAELLKIPLVYTLRFSPGYTYEKYNAGLLFPPSYVPVILSRLSSQMTFMERVKNLMHLLYFDFWFQTFNEKKWSQFYTEILGRPTTLSQSMAKAEMWLIRSYWDLEFPRPTLPNTEFVGGLHCKPAKPLPKEMEEFVQSSGEHGIVVFSLGSMVHNLTEERANVIALALAQLPQKVIWRYSGKKPDTLQPNTQLYEWIPQNDLLGHPKTKAFVTHGGANGIYDAINHGVPMVGIPLFGEQHDNIAHMEAKGAAVVLDFMTMSTADLVNALKEVMNNPSFKENVMWLSTIHHDQPMKPLDRAAFWIEFVMRHKRANHLRPLAQNLTWYQYHSLDVIGFLLACVVTVTLLVTKCCFFCYQKIVKTGKKKKE

SEQ ID NO: 8420 - protein, 278 aa, Erinaceus europaeus
MATSHYGQQPFSASGRQGEKGQKRERRKQEGSIWQKPEVEIEEFVQSSGENGIVVFTLGSMIKDMSEERANMIASALAQIPQKVLWRFDGKKPDTLGSNTQLYKWIPQNDLLGHPKTRAFITHGGTNGIYEAIYHGVPMVGIPLFADQPDNIAHMEAKGAAVRVDLETLTSADLLNALRKVINDPLYKKNAMWLSAIQHDQPVKPLDRAVFWIEFVMCHKGAKHLRPALYNLNWFQYHSWDVIGFLLACVAIVTFFVIKCCLFCCAVFVKTSKKKKRE

SEQ ID NO: 8421 - protein, 786 aa, Drosophila grimshawi
MHLQALRLALLCSVLGALTQVRPVDGAKILAVYAFPGKSHYMMHTALIRELIESGHQVTMIAAFSLESQQLGSNYTELLIEPVYDFWHDVKLNFGVQHLFDLTRMKNYDFLKMLEIIGLKTTEHALLQPKVQSLIHATETEGVFDLLLAEQFYQEAFLALAYKYNIPIVTTSTLGYENHMSQMMGLITPWSFVPHGFMPFTDRMSFLERLRNTYVSLYEDLDRLYNYFPKMDNLAKQHFGNVLADVPKVRQMEKQISQPKNVLKFLLLGFVALQHFEIGAGSRILAAFFFPGKSHFMMTNAIIRELVQRGHEVTFITPFTLANENLGSNYTEVLLPQFNIWRTILEMSKGKSVLDMTDMDTLTFIKMAMVMGSETTNFAFEQKEVLNLINAKDKVGKFDLLLAEQFFNEGALLLGHLYQIPIITMSTFGFANYLSPLVGIVTPWSYVSHGWKPYSDRMSLSERIDNVYSSLMEDIIRQFWYYPAQNEILQRHFSKQFKDLPTIKQLESNISVILLNAHMPLEPPRPLSFNMIPVGGLHIKPAQPLPTEMQKFLDEAEHGAIYFSLGSQVKSADLPPEKLKIFLDVFRSLKQRILWKFEDDKLPNKPANVMVQKWMPQSDILAHPNVKVFISHGGLFGTQEAVYHGVPVLGMPVYADQYLNINKGKVAGYALGVDYRTVTEEELRYSLTELLENPKYRDTMRRASRIFRDRPLSAMDTAMFWIDYVIEHRGAPHMVSEGINLPWYKFYLLDIIGIALAIVLLPILGLFLICRSFKSNKKQKPKSKRH

SEQ ID NO: 8422 - protein, 401 aa, Colobus angolensis
MSVKWTSVILLIQLSFYFSSGSCGKVLVWAAEYSHWMNMKTILEELVQRGHEVTVLASSASILFDPNNSSALKIEVFPTSLPKPEFENLVTQEIKRWLDLPKDTFWLYFSQMQEIMWKFGDIFREFCKDVVSNKKLMKKLQESRFDVVFGDPIFPCRRPTTLSETMGKADIWLIRNSWNFQFPHPLIPNVDFVGGLLCKPAKPLPKVLWRFDGNKPDTLGLNTRLYKWIPQNDLLGHPKTRAFITHGGANGIYEAIYHGVPMVGIPLFADQPDNIAHMKARGAAVRLDFDTMSSTDLANALKTVINDPLYKENVMKLSRIQHDQPVKPLDRAVFWIEFVMRHKGAKHLRVAAHDLTWFQYHSLDVIGFLLACVATVIFIIMKCCLFCFWNFARKAKKGKSD

SEQ ID NO: 8423 - protein, 539 aa, Peromyscus maniculatus
MSTAFHFSKMSMKQTSVLLLIQLICYFRVGTCGKVLVWPTEYSHWINIKMILDELLQRGHEVTVLTSSASVLIEPSKESSINFEIYPVPLSKDDLQYTFEEWVTRWTYDFQKPSLWIYYSKMQQIFNEYSDVIESFCRAVVWNKSLMKKLQGSKFDVILADAVGPCGELLAEVLKTPLVYSLRFCPGYKCEKYSGGLPLPPSYVPVVLSELTDHMTFVERVKNMLQVLYFDFWFQPFNEKTWSQLYSDVLGRPTTLYEIMGKADIWLIRTYWDLEFPHPLLPNFEFVGGLHCKPAKPLPKEMEDFVQSSGEHGIVVFSLGSMVRNLTDEKANIVASALAQIPQKVLWRFDGKKPETLGSNTRLYKWIPQNDLLGHPKTKAFIAHGGTNGIYEAIYHGIPIVGIPLFADQPDNINHMVAKGAAVRVDLDTLSTTDLLTALRTIINDPSYKENAMRLSRIQHDQPMKPLDRAIFWIEYVIRNKGAKHLRVAAHDLTWFQYHSLDVLGFLLACVVTVMLIIMKCCLFCCRKFSKAGKKKKRE

SEQ ID NO: 8424 - protein, 527 aa, Tupaia chinensis
MLNNILLLSLQLSLLGNALGGKVLIWPMEGSHWLNVKIIIDELIKKDHNVTVLLYSGALFIAPTVNPSLTFEIYNVPFGKERIEGVIKDFVLTWLENRPSPSTIWRFYQEMAKVIEDFHMVCREICDGVLKNQKLLEKLKKDEFEVLVSDPVFPCGDIIALKLGIPFMYSLRFSPASTVEKHCGKVPFPPSYVPAILSELTDQMSFADRVRNFISYHLQDHMFETLWKSWDSYYSQALGRPTTLCEIMGKAEIWLIRTYWDFEFPRPYLPNFEFVGGLHCNHSKPLPKEMEEFVQSSGEDGIVVFSLGSMVKNLTDEKANIIASALAQIPQKVLWRYKGNKPAALGANTRLYDWIPQNDLLGHPKTKAFITHGGTNGIYEAIYHGVPMVGIPMFADQPDNIAHMKAKGAAVDVNMNTMTSADLLNALKTVINEPSYKENAMRLSSIHHDQPVKPLDRAVFWIEFVMRHKGAKHLRVAAHDLTWFQYHSLDVIGFLLACIISAMFLVTKCCLFFYKKFHKTEKKKKRE

SEQ ID NO: 8425 - protein, 412 aa, Galeopterus variegatus
MSMKWNSVLLLLQLSCYFSSGSCGKVLVWPTEYSHWMNMKTILDELGQRGHEVTVLTSSASIHVDPNKTSTIKFEVYPTSLSRDAFDAFVLMVVKKWERIPKDRFWFQTFNLKEWDQFYSEVLGRPTVLLETMAKAEIWLIRSYWDFDFPRPLLPNFDFVGGFHCKPAKPLPKEMEDFAQSSGEHGVVVFTLGSMISNMPEERANVFASALAQIPQKVIWRFDGKKPDTLGANTRLYKWIPQNDLLGHPKTKAFITHGGGNGVYEAIYHGVPMVGMPLFADQPDNIARMMAKGAAVRLDFDTVSSTDMLNALKTVINDPLYKENIMRLSRINHDQPTKPLDRIVFWIEFVMRHRGAKHLRVAAHDLNWVQYHSLDVIGFLLACVATVIFAITKCCLLCCQKFAKTGKKEKRE

SEQ ID NO: 8426 - protein, 508 aa, Anopheles sinensis
  MOD_RES (32)..(39): Any amino acid
MMFLRLQLMLVAFVAGSRGANILFMSAIPSTXXXXXXXXKSFLKIIQIFMDRLRPLIYELGKRGHNVTVISADIEKQPPANVSYIHLENLYSATYNTSFRQNVDFFNLASQGPIPMLGLIHGIGLHMCEAGIKSEGMHFLLNYPKDFKFDLFVNDFMIGPCLPSIIMHRFKDVPYIPATAYNAPSTGAPVLGSYAYSGLVPNHVYDVPEVMSFVQRVKNFYYDAYEMITHETNMHPEADRILRTIYPSAPSTTTFYKNVRVSFINANPIIQYKEPMMPNMIPVGGLQIQPPKPLPEDLRKVVDGARNGFILFSLGSNARSDLLGPERIRNILTAMGRLPQYQFFWKFESDQSKLPMAVPKNVFIRAWMPQNDLLAHPNIKLFITHSGLLSTQEAIWHGVPVIGFPVFTDQFRNINYCVNVGIAKRLSIHDFQANELVDAVKKILGEPKYATKMKQVSRLFRDQPETPLERAVWWCEWVLRNPDADLLQSRAVHLNKKIKERVIVKENT

SEQ ID NO: 8427 - protein, 505 aa, Helobdella robusta
MLSHVLEQVAAGKVLLKAGHEVHLILDSRFDPSLVKKFQNDGFRLHFFKAPTSFVTFSSEEYKKHLGDQIFNANVDFYTHLAIVGEQVNEECGYMLEDKKFIDELKDVGFDLAIPEPFAVIMCPLIIPKYLKIPFVSLTNLYFAFQIRSPALPTYYLRHFQTADDKREMSFFVRFKQLLVIIFFSSRLSPLNRNLTLLHKYAPEFATWDELLRESLLFFYEVDHHFTNFLPAFPNHISVAGLTCSPAKPPPENILNFINSRIVNGKDPGVIVMTFGSSADYMPRGIVKKFFNVFSQLNETIIAKFTIKKTDKELLALVPPNLLILNWLPQNDLLGHPSTKLFITHCGNNGQHEALYHGVPMLGFPLFAEQHMNARRMTVKGFGLGMNILTFTESDLLQNILEIEQNPNYRSSIKLASKAFRDQPMTAQERILFWIEHVIKHGGAHLRSGAMDLPLYQFLCFDTVGTLLLIVIVIIVVTLKLSVHCVEKFIRCYKIRFCKKKEKEL

SEQ ID NO: 8428 - protein, 423 aa, Acropora digitifera
MLIEAGGPSWEFLSYVMNIKKVTCELMLNNTDFLGDLKGFDLMVHDSMELCSVMLAQYLGIQRVEVIPASPNGFFAWAHMIPMPVSYIPQVVPGYSDKMTFLQRVVNLGASVSIGWFQFLLSQTMNNIKIKYNIKPEQSLWEAQNEAELCIITADFALEYPQPLLPGNIMVGPLNAKDSQPLPNELEAFVNNSDHGFIVVSFGSNVGFLAKEKVDTMAIAFGKLKQKVVWRLKGHIPSSLRPNIKVSEWLPQNDLLGHEDVRAFVSHVGHNSLYESAYHGVPLIAFPLFGDQAYNAKRVEYFGLGLSVDHKTFDDEHLFQRIENVIYDPRFKNAAIRVSKLLRDRQRTPLQTTGDWVEYVLKHGGARHLRAQVFYLSWYQYYLLDVIFFLVTIVIVVGMAIRLAFKCLCRLCCCQRGSKSKKE

SEQ ID NO: 8429 - protein, 412 aa, Chrysochloris asiatica
MSVKWVPLLLVIQLSCYFSSGRCGKVLVWPTEYSHWINIKTILDELIQRGHEVTVLTSAASVLINPNMASAIKFEVYPTSFNKEEIEISFMSWINEWTRKSKDDFWFQTFNEKKWDQFYSEVLGKPTTLSETMGKAEIWLIRTYWDFDFPRPFLPHFDFVGGLHCKPARPLPKEMEEFVQSSGKHGIVVFTLGSMVRNITEEKARMIASALAQIPQKVLWRFDGKKPDTLGSNTRLYKWLPQNDLLGHPKTKAFITHGGTNGIYEAIYHGIPLVGIPLFADQPDNIAHMKTKGAAVSLNIDTMTSTDLLNALKTVINDPFYKENAMRLSAIHHDQPVKPLDRAVFWIEFIMRHKGAKHLRPASHDLTWYQYYSLDVIGFLLACVAIVTFVIIKCCLFSYKKLFKRGKKKKRE

SEQ ID NO: 8430 - protein, 530 aa, Rattus norvegicus
MSGKWISALLLLQISFCFKSGNCGKVLVWPMEYSHWMNIKIILEELVQKGHEVTVLRPSAFVFLDPKETSDLKFVTFPTSFSSHDLENFFTRFVNVWTYELPRDTCLSYFLYLQDTIDEYSDYCLTVCKEAVSNKQFMTKLQESKFDVVFSDAIGPCGELIAELLQIPFLYSLRFSPGYTIEQYIGGVLFPPSYVPMIFSGLAGQMTFIERVHNMICMLYFDFWFQTFREKKWDPFYSKTLGRPTTLAEIMGKAEMWLIRSYWDLEFPHPISPNVDYIGGLHCKPAKPLPKDIEDFVQSSGEHGVVVFSLGSMVRNMTEEKANIIAWALAQIPQKVLWRFDGKKPPTLGPNTRLYKWLPQNDLLGHPKTKAFVTHGGANGIYEAIHHGIPMIGIPLFAEQHDNIAHMVAKGAAVEVNFRTMSKSDLLNALEEVIDNPFYKKNAMWLSTIHHDQPTKPLDRAVFWIEFVMRHKGAKHLRSLGHNLPWYQYHSLDVIGFLLSCVAVTVVLALKCFLFVYRFFVKKEKKTKNE

SEQ ID NO: 8431 - protein, 526 aa, Geospiza fortis
MAGKEVAVLVLLAVLGWGSGGKVLVWPADNSHWLNMEHILQELVARGHEVTVLLPSCFLIVNPTKPSPFQFEVIEVPITKKEMTDLMDKMFYFFFYEEKGLPIWKGTYKMVQMVLQMKNITKIICDGVVKNEALMERLRASAFNLFLADPLFPSGELVAEKLGIPFVYTFRFSMGNTVERLCGTLPAPPSYVPTTLTRLTDRMTFWQRLKNILGYALHDFMFHYLLWANWDQYYSEILGRPTTLCETMGKAEIWLIRTYWDFEFPRPFLPNFEFVGGLHCQPAKPLPKEMEEFVQSSGEHGVIVFTLGSMVHSLSDEKSNVIAKALSQLPQKVLWRYKGKKPETLGSNTRIFDWIPQNDLLGHPLTKAFITHGGTNGLYEAIYHGIPMVGIPMFADQHDNLAHMVAKGAAVQVDFNTMKTQDLVDALKTVIYNSTYKENALKLSKIQHDQPVKPLDRAVFWIEFVMRHKGAKHLRPAAHHLTWYQYHSLDVLAFLFTCTATIVFILFKCCLCCCRRCGRIAKRKTE

SEQ ID NO: 8432 - protein, 532 aa, Bos mutus
MHKMSMQWLSLLLLLQLTCYFNSGSCGKVLVWPMEYSHWMNMKTILDELVTRGHEVTVLTPSVTTFIDPKKPSSLKLETFPPSLTKEESENFVKLFVEAWMHAVRDSFWNHLSMVQSLFWGYSDILMKMCKEVVSNKKLMTKLHEERFDVIFADAVGPCGELLAEILKIPFMYSLYSTPGSSVEKKSGRLPFPPSYVPAMFSELSDHMTFMERVKNMIYVLYFDFWFQAYNEKNWNQFYSEVLGKPTTLVETMGKAEMWLIRNYWDFSFPRPRLPNFEFVGGLHCKPAKSLPKEMEEFVQSSGENGIVVFSLGSMVSNMSKERANVIASALAQIPQKVLWRYDGKKPDTLGPNTQLYKWIPQNDLLGHPKTKAFVTHGGSNGIYEAIYHGIPIVGLPLFADQPHNIVHMKAKGAAVRLDLETMSTEDLLNALKEVINNPSYKENMMRLSAIHHDRPVKPLDLAVFWIEFVMRHKGAKHLRPAVHNLTWLQYHSLDVIGFLLACVATGAFVITKCCLFCYQKFAGKGKKGKKD

SEQ ID NO: 8433 - protein, 531 aa, Tetraodon nigroviridis
LLAWSPSEVWTAKIIVVPPIMFESHLYIFKTLATALHGEGHETHLLISEGREVSLSPYYHLQRYPGIFNSITADNFLQSKVRNIFSGRLTFLELFDILDHYSQNCDAVVGNNEVMTRLKEAKFDLLLVDPNEMCGFVIAHILGVQYAVFSTGLWYPAEVGAPAPLSYVPEFNSLLTDHMTLFERITNTVVYLAQRFGVQYIALPKYDRIMKKHGVKPQVAMSDLVQGSRLWMLCTDMALEFPRPTLPHVVYIGGILTKPPNPLPQDFEAWVNDTAEHGFVVVSFGAGVKYLSQDITQKLAGALARLPQRSLEFHPITCGKNIKLVDWMPQNDLLGHANTRAFLSHGGLNSIYEAMYHGVPVVGVPLFGDHYDTMTRVAAKGMGIMLHWKYMSENDLYTALTSVITDKRYRQQAQLLSNIHKDQPGHPVTRAVYWINYILRHNGASHLRSAVYKVSPYQYFLLDAILTIGAVLALVGFSLRQVFRLMCGRVRNQSDATRDGSVTSNGHCHSESMVNGKHKGNGLLKNEKKIN

SEQ ID NO: 8434 - protein, 280 aa, Bison bison
MGKADMWLFRSYWDFEFPQPYLPNTEFVGGLHCKPAKPLPKEFEEFVQSSGKDGVVVFTLGSMIKNLSEEKSNMIASALAQIPQKVLWRYTGKKPETLGANTRLYKWIPQNDLLGHPQTRAFITHCGTNGIYEAIYHGVPMVGIPMFGDQHDNLARMKAKEAAVEVDLQRMTSADLLNALKAVINNTSYKENAMKLSRIHHDQPVKPLDRAVFWVEFVMRHKGAKHLRPASHDLNWFQYHSLDVIGFLLACVATVAFLVTKCCLFCCWKFGKTAKKKKRE

SEQ ID NO: 8435 - protein, 528 aa, Ochotona princeps
MKMLAFLLLLQLSFHFNPVNCGKVLVWPMEYSHWMNMKTILDALVQRGHAVTVLRSSASILIEPSNESGIVFETFPSPSTKDEMEAFFLNSINTMIYDVSRDAYWEYFPLMQESILEYSNMHESSCKEVVFNKKIMAKLQASKFEIVLADTIAPCGELLAELLEIPLVYSVRFTPGYTYEKYSGGLLFPPSYVPVIMSDLSGQMTFTERVKNMLFMLYFDFWFQTFNNKRWSQFYSEALGRPVTLSELMGKAEIWLIRSYWDLEFPRPLLPNFYFVGGLHCKAVQPLPKEMEDFVQSSGEEGFVVFSLGSMISNMSEERANVIASALAQLPQKVIWRFEGKKPNTLGNNTQLYKWIPQNDLLGHPKAKAFVTHGGANGIYEAIHHGVPMVGLPLFGEQYDNLAHMKAKGAAVRLDWKTMSSTELFNALKTVINDPFYKDNVMKLSRIHHDQPMKPLDQAVFWIEHVMRHKGAKHLRVAAHDLTWYQYYSLDVMGFLLVCVTIISYLVIKFCMFSYQQIVMNGKKKKRD

SEQ ID NO: 8436 - protein, 529 aa, Miniopterus natalensis
MAMKWIFILLLLQLSCHVRPGWCGKVLVWPTEYSHWMNMKTILDELVQRGHEVTVLTSSASILVDPNKPSAINFEIYPTSLTKDDFEHIFMQVLSKWIYIPDDTFFSYFSQMQDMLWELYISFRKLCKDVALNKKLMTKLQETRFDVILADPFGPCGELLAEVLKIPLVYSLRFTPGSTIEKHIGGLPFPPSYAPVVLSELSDQMTFMERVKNMIYVLYFDFWFQTFDQNKWDQLYTEVLGKPTTLFELMSKAEMWLIRTYWDFEFPRPFLPHFVFVGGLHCKPAKPLPKEMEEFAQSSGQNGIVVFTLGSMVSNISEERANVIASALAQIPQKVLWRFNGKKPDTLGPNTRLYKWIPQNDLLGHPKTKAFITHGGTNGIYEAIYHGVPMVGIPMFADQPDNIARMQTKGAAVRLDFNTMSSADLLNALKTVINDPSYKENAMRLSRIQHDQPMKPLDRAVFWIEFVMRHKGAKHLRPASHDLTWFQYHSLDVIGFLLACVATAIFVITKCVLFCCQKCANPGKKGKRE

SEQ ID NO: 8437 - protein, 485 aa, Colobus angolensis
MSVKWTSVILLIQLSFYFSSGSCGKVLVWAAEYSHWMNMKTILEELVQRGHEVTVLASSASILFDPNNSSALKIEVFPTSLPKPEFENLVTQEIKRWLDLPKDTFWLYFSQMQEIMWKFGDIFREFCKDVVSNKKLMKKLQESRFDVVFGDPIFPCSELLAELFNTPLVYSLRFTPGYGFEKHCGGFIFPPSYVPVIMSELSDQMTFMERVKNMIYMLYFDFCFQMYDMKKWDQFYSEVLGRPTTLSETMGKADIWLIRNSWNFQFPHPLIPNVDFVGGLLCKPAKPLPKVLWRFDGNKPDTLGLNTRLYKWIPQNDLLGHPKTRAFITHGGANGIYEAIYHGVPMVGIPLFADQPDNIAHMKARGAAVRLDFDTMSSTDLANALKTVINDPLYKENVMKLSRIQHDQPVKPLDRAVFWIEFVMRHKGAKHLRVAAHDLTWFQYHSLDVIGFLLACVATVIFIIMKCCLFCFWNFARKAKKGKSD

SEQ ID NO: 8438 - protein, 514 aa, Alligator mississippiensis
MYATFVLGKMCFWHSGSCGKVLVWPTDASHWINLKMILGELILRGHDVTVLVPSATLLIDYDDPTSPFDFEVLKVPFTKETVKTVLQDFLSLCLYEKPHLSHWEALVKIRQMMTTFTKMSKQTCDGFVLNPKLITKLRHGGFDVLISDPLAPGGELVAEVLEIPFVYTFRFSEGNTLERLCGGIPAPPSYVPASTGELTDRMSFLERLTNFLLYLYNDALYLYFWEDEWNQYYSNVLGRPTTLCETMGKAEMWLIRTYWDFEFPRPYLPNFEFVGGLHCQPAKPLPEEMEEFVQSSGEHGIVVFSLGSMIHNLTDEKNNMIATALSQLPQKVLWRYKGKKPETLGTNTRIYDWIPQNDLLGHAKTKAFITHGGTNGIYEAIYHGVPMVGIPIFADQPDNIAHMRAKGMAVELDFNTMKAQDLVDAVNMVVNNFTYKENAIRLSQIHHDQLVKPLDRAVFWIEFVMRHKGAKHLRPAAHQLTWYQYHCLDVLAFLLTCATVTLFIAVKCCLFCYL

SEQ ID NO: 8439 - protein, 530 aa, Propithecus coquereli
MALQWTSVLLLIQLCGYFSSGTCGKVLVWPTDYSHWMNMKIILDELVQRGHEVTVLASSVSVVIDPSKTSAIKFELFPTSLSKDDFDGFLMKLLDRAIYGVPKDTFWSPVSQIEEIMREFSEVLRKLCEDAVLNKKLMTKLQESKFDVLLADGVGACADLLAEILKTPLVYSLRFSPGYTFEKYSGGLIFPPSYVPVAMSELSDRMTFMERVQNMIYMLYFDFWLQAYDVKKWDQFYLEVLGRPTTIYETMKKADMWLIRTYWDFDFPRPLLPNFDFVGGLHCKPAKPLPKEMEDFVQSSGENGVVVFSLGSLISNMTEERANVIASALAQIPQKVLWRFDGKKPDTLGRNTRLYKWLPQNDLLGHPKTKAFITHGGANGIYEAIYHGVPMVGIPLFADQPDNIARMKSKGAAVRVDFNTMSSADLLNALKTVINNPIYKENAMKLSRIQHDQPVKPLDRAVFWIEFVMRHKGAKHLRVAAHDLTWFQYHSLDVIGFLLACVATVVFIITKCCLFFCRMFATAGKKEKKE

SEQ ID NO: 8440 - protein, 537 aa, Drosophila yakuba
MAGISRCLALHIVLLLAGAHGANILGLFTSLSPSHLVIQMSMARILAEQGHNMTVVTVLKPPSLHKNINHILVPMNEDTLSTFSSLVGGMTKTDNSNAIVSMFRSLKVISEAFSKMGDVMKQPLIRDLYEHADNKFDLVLMGYFMNSYQLAVAHKLKVPVVVAVSNPPSFLGYVLGNPWEVSYVPAMNMAIESGQSMGIGHRALNLLGSLGSRLFMYVIELKNTKIYREIYGNDPTLPSYEDLNKNISLIFFASHGISEGPIRPNVPAVIEVGGIQVKEQPDALPENMEKFLSEAPQGAILLSLGSNVKQDHLSTDTVQKMYNVLSKLQQKVIWKWDDLENVPGRSENILYSKWVPQDDVLAHPNLTLFITHAGKGGITEAQYHGKPMLALPVFGDQPANADVMVRQGFGLKQSLLTLEEDSFLQGIREVLENPKYANAVKSFSTLYRDRPMSARESLIYWVEYVMRYHGAAHIQSPVVHMSYIAAHNLDVYAVILGTIVALCFITKLVFGLVFRKLRQSSGKPKVNQQRKLKKKQS

SEQ ID NO: 8441 - protein, 528 aa, Anopheles sinensis
MASSTTVKWLLLLIGYFGTNTLAANILYFNTVASPSHFVWNRALIYALAGAGHNLTVFSVDNDTKPPPNVTFILLEDVYKKLNSEGDVDTDYLAMIKTGPFAMLSIYNNFMLGVCKLALEAEGAKRLYEYPEDFGVDLIMYDYFTGPCMAALAHHRFGKPPVVAVTAYHGLSTSSHISGAFHYSALVPNHAYDAMEEMTYCQRFKNLLLNIWEDLLQRHNLIPKTNQLLRQYDPTLPDVTEFNRETKVVLLNANPVIQFTEPVMPNVIPVGGLQIIKPKPLPDDLAKILEQAPPGGVVLFSLGTNVRSDKLGKTRITAILDAMEALPEYHFIWKFESDSMPRALPPNVHLRKWLPQNDLLAQPKVRLFITHSGLLSTQEAIWHGVPMIGFPVFADQFKNINYCMAKGVGKRLSIEHINTKELVDTIKEVMAKESYRTNMKRMSELFRDQPEHPLDRAVWWIDWVLRHPDSTELLTHGTRFHWFVKYSYDVLVPLLAAIAIVCHLVIFTVRRVVFSQKTAPKGVKQKRS

SEQ ID NO: 8442 - protein, 530 aa, Dasypus novemcinctus
  MOD_RES (194)..(194): Any amino acid
MVTEKRVSALLLLQLCCVGCGFCGKVLAWPCDLSHWLNMKIILEELIERGHEVTVLAPSPSFLIDYSKPSTMNFKTITMPNNGENAKNLLNEFLDVAINVMPKMSYWQSAMKLQDFILQTTGDVKFFCESIVYNQTFMKNLKETNYNVMIIDPIVPCGELIAELLAVPFVHTLTTSIGGTFERHCRKIPAPLSXVPVPLVELEDKMTFLERVKNLMLSFLCDFWLQQYDIQFWDQFYSEALGRPTTLCETMGKAEMWLIRTYWDFQHPHPYLPNFEFVGGLHCKPAKPLPKEMEEFVQSSGEDGVVIFSMGSMIKNFPEDKANLIASALAQIPQKVLWRYQGKKPNTLGANTRLYEWIPQNDLLGHPKTKAFITHGGMNGLYEAIYHGVPMVGIPLFVDQPANIAHMKAKGAAVDMNFNTMTSADLLRALKTVINEPSYKENIMRLSRIHHDQPVKPLDRAVFWIEFVMCHKGAKHLRPAAHDLTWFQYHSLDVIGFLLACVATAVFLVTKCCLFCCQKLDKIGKKRKRE

SEQ ID NO: 8443 - protein, 299 aa, Chinchilla lanigera
MKAIKCEMVAGKPTTLYEKMKQADMWLIRSYWDLEFPRPTLPNVDFVGGLHCKPAKPLPKEMENFVQSSGEHGVVVFSLGSMVSNMTEERANVIASALAQIPQKVLWRFDGKKPDTLGPNTRLFKWLPQNDLLGHPKTRAFITHGGANGVYEAIYHGIPMVGIPLFAEQFDNIAQMEAKGAAVKLEFKSLSTTDLLNALKTVINNPFYKSNAMKLSTIHHDQLMKPLDRAVFWIEFVMRHRGAKHLRPLAQNLTWYQYHSLDVIVFLLALVAIIIFLVLKCCLFCFQKFAKVGKKKKRE

SEQ ID NO: 8444 - protein, 529 aa, Bos taurus
MKTVKGFCILFMLHLCLLDSGRMGKVLVWPVDFSHWINLQFILEELHIHGHEITVLVPSQNLLIDHTKVPYHVEILQLSVTEETFMEEFNSMLYEEIFELPKLSWWEMQIKLADLVKKFLLTNKRVCDSAITNKELLSRLQAANFDVCIADPLSFCGELVAELLNIPFVYTFRFFYGNAIERLCAGLPMPSSYVPGVTSRLTDKMTFRQRLENWLLYTVSDMIYSYYIFPEWDEYYSKVLGKPTTLCEIMGKADMWLFRSYWDFEFPQPYLPNTEFVGGLHCKPAKPLPKEFEEFVQSSGKDGVVVFTLGSMIKNLSEEKSNMIASALAQIPQKVLWRYTGKKPKTLGANTRLYKWIPQNDLLGHPKTRAFITHCGTNGIYEAIYHGVPMVGIPMFGDQHDNLARMKAKGAAVEVDLQRMTSADLLNALKAVINNTSYKENAMKLSRIHHDQPVKPLDRAVFWVEFVMRHKGAKHLRPASHDLNWFQYHSLDVIGFLLACVATVAFLVTKCCLFCCWKFGKTAKKKKRE

SEQ ID NO: 8445 - protein, 518 aa, Drosophila virilis
MRLLTLLLVALITLIGRALQTEGSKILAIFAFPGRSQYIFAESYLKALAARGHEVTVINTFDNEAASNVRFITASKIHDYYEDMLNAMIAPSFWQKHKTFSWMLEVIAECVLADENVQQLLKSGETFDLVIAEVVHTESLFGFAQHFNATLMGFSTYGNDYFIDELMGNISPQAYNPLISSPRSNPMTFYERLENHWEIWLEKLVQSFIHYPKMEQQYAKYFPQAKKSLSETLDSFALMLLGQHFTLSYARPYLPNMIEVGGLHIAQKQKALPEDIKHFIETSPEGVIYFSLGSNVKSKDLPVETRNMLMMVFGGLKQRVLWKFEDDQLPNKPDNVFISKWFPQPDILAHPNVKLFITHGGLLSTIESIYFGKPVLGLPVFYDQFMNVKHAARMGFGLGLDLLNLKQTELVDTINILLTTPTYSKTASILSERYRDQPESAMDRAIWWTEYITRHKDASYMRAPSRDMSYVQLHSLDTLAVLLAAPLLFMWLLITFIRWLLCLIFGDKQRNRDKQKRH

SEQ ID NO: 8446 - protein, 515 aa, Anopheles gambiae
MKLSQGVAIAWVVLCCCFAQLEAYRILCIYPSSGRSHVLVGQALLKGLAARGHDVTMVSPFKLSKPVPNYREIVVQKVDLGQMTRDFLQKNTGNSLGGIVHLFQTQFRTAEMAMEDAQVQALKDEHFDLVIVGYFVADFVLGFGPHFNAPTVVLFSAGLTKMTADFVGNPRAVATVPAIMVGGRGALDFAGRVKNFLFAGVENVITAVSDYVQTSYYEQFFPPGRYPSYADVRRNVSLVLLNTHFSQATPRPYLPNVVEVGGLQIKAKPDPLPEDIREWLDGAGEHGVVYFCLGSNLKSADLPQAKLDAILKTFAQLKQRVLWKWESDHIPNAPPNVLSKAWLPQDDVLAHPNVKLFISHGGLGGMAEAKYHGVPVLGIPIFAEQHQNIQSMIDDGVAMQVDYKQLDERTFSRAVNIMVREHRFAERAKAISELYRDRPQSAMDLACYWVEYVARHRGAPQLHYPGADMNFFQQESLDVIAFLVAILYVVFKVSKLVLRFAYRKVFKSSRKTKVQ

SEQ ID NO: 8447 - protein, 528 aa, Cavia porcellus
MKRILALLLLQLCCHFHSGSCGKVLVWPMEFSHWMNIQVILEELIRRGHEVTVLRPSCFIFVDVNTTSEIKFETFHTSFTRDYWEKIFTDLVTTWLNTGSVDTCLDYFPEVEKLFKHFSDEWENVCKELVSNKKFMKNLQESRFDILLADAVGPCGELVAEILHIPFVYSLRFSPGFQAEKRAGGLLLPPSYVPVIMSGLSGEMTFMERVKNMICMLYFDFWFETFDEKRWDKLYSEILGKPSTLYETMSKADMWLIRSYWDMEFPHPSLPNFDYIGGLHCKPAKPLPKEMEEFVQSSGEHGIVVFSLGSMIRNMTDEKANLIASALGQIPQKVLWRFDGKKPDTLGANTRLYKWIPQNDLLGHPKTRAFITHGGANGIYEAIYHGIPMVGLPLFGEQYDNIAHMKAKGAAMKLEFNSLSSTDLLNALKTVINNPSYKENAMWLSTIHHDQPMKPLDRAVFWIEYVMQHKGAKHLRPLAHNLTWYQYHSLDVIGFLLACVAAITFLIIKCCLFCFQKFMETGKKKKRE

SEQ ID NO: 8448 - protein, 523 aa, Lingula anatina
MRITTTALWCVAVLVVSTQVEDISSSKILLIPYIHQQTSRLMNVVKIGQMLSEHNHDVAMLLPSNCVPKNVPEKIRTITFKLDTLPFEISEETFLHEMRKDPFVFMSSWIEYSKDLLDSLFNDSGVIMKMVNEEFDLVFMDILSPQGLIVRDYLGIPGVGYSNLGFGDDWYYFSPLNPSYVPSTTGKSSDRMDFWERLINTLSIFGTHYVLGKMIEPFSEAKLKYNLNTSLSILEAPTRLSLVIVNVDFVFDYPRPVMPWVKPVSGLLFHPAKPLPEDLERFVQSSGEHGIIIMSFGTMIAGLSSETMAMIARVFARLPQKVILRNSKFNVQRLGNNTKMLSWIPQNDLLGHDKTRLFITHCGVSSSHEALFHGVPVIAVPLFFDQFSHAKKLVQRIGMGEELDFYNLTEQAFGATIKSVLTNPSYYENAKRASALVRDQPMNGKDTMRFWIEYVIRNKEAMHFHSQAMERLNWFQYLLLDVIGFIIIITFCVLIVIWILSKVLYSLVPKMYRRKPDVKTKGE

SEQ ID NO: 8449 - protein, 403 aa, Branchiostoma floridae
MLGRLKTAQYSVVISDPFLRCGTIVAANLGIPHIANSADDGTFFDKMATGVPLPLAYVPSIELGYTDQMTFLQRLENTCFFGLSNIFKSWLYANVYHDLVHTYVSEKETIQSLTSHTDLWLYHTDTVLGFPRPSMPNMVQVGGLMADRPVVPLSVDIEDFMQSSGDDGIIVVSFGSMVHTMSTERKEMFAAVFAQLRQKVVWRYLGEKPAGLGNNTKLMSWLPQKDLLAHPKTRAFVNHAGRNGVYEALYHGVPMVCLPLFGDQPGNSARVVARGLGVSLDFRTVTSDQFHQAVLRVLTISSYRETAARLSRLYRDQPQSPMDRAVWWIEHVIKHGGLPHLRARAVELPWYQYYLLDVAAFLLAICSAVLGTLWYSCSSVCRKVCCKRGGKLRSRRKATIIYV

SEQ ID NO: 8450 - protein, 445 aa, Carlito syrichta
MSMKWVSVPLLIQLSCYFSSGSCGKVLVWPTEYSHWLNMKTILDELVQRGHEVTVLASSISILVDPNKSSTIKFEVYPTSLTKNDYKNTITRVINLWTHAPKDTFWSFFSQVQEIMWDFSNVFKKLCEDTVLNKKLMRKLQEARFDVLLADTIGPGGRPTTLLETMGKAEMWPIRTYWDFEYPRPLLPNFDFVGGLHCKPAKALSKEMEDFVQSSGENGIVVFSLGSMVSDMTEERVNVIASALAQIPQKVLWRFNGKKPDTLGPNTRLYKWIPQNDLLGHPKTKAFITHGGTNGIYEAIYHGIPMVGLPLFADQPDNMAHMKTKGVAISLDYHTMSSTDLLNAVKTVIHNPLYKENAMKLSEIQHDQPMKPLDRAAFWIEFVMRHKGAKHLRVAAHDLNWFQYYSLDVIGFLLACVATVIFTVTKCCLFFFQKFAKTERKGKKD

SEQ ID NO: 8451 - protein, 274 aa, Ochotona princeps
MWLIRSYWDLEFPRPTLPNVHFVGGLHCKPAKPLPKDMEDFVQSSGEEGVVVFSLGSMVSNMTEERANVIASALAQLPQKVLWRFDGKKPETLGPNTQIYKWIPQNDLLGHPKTRAFVTHGGANGIYEAIYHGVPMVGLPLFADQPDNIAHMTAKGAAVRLNWKTMSSADLLNALRTVIHDPSYKENVMMLSRIHHDQPMKPLDRAAFWIEHVMRHKGAKHLRVAAHDLTWYQYHSLDVIGFLLACVTITTYLVIKICLSVYQKLVKTEKKKSD

SEQ ID NO: 8452 - protein, 542 aa, Drosophila mojavensis
MGRSLLSGTFVCLLLGFFVLQSARVEGANILGVFTSHSPSHFIINMSIMKALAEDGHNVTVVSGTPPKVTHKSIKHIVIPLSAAEEKELNDGMSSLAKEKPSVFTTFRNIFGSLSMLIYKQVDVLEDTRFTDLYKNKDNKFDAVIVGFFFNNYQVGLGSLFNCPIILTWTGPPMMQIDRNIGNPELISSVPSMHVAVAPGRAMNFKERLANFGGTMFFRLFAFYLEILNDKFYDRLWGNIPSMMTYEQAKQNISLAFCSSHGISEGPIRPNVPALVEIGGIQIKDKRDPLPEDIQQFLDGAKHGAILFSLGSNLKGDHIDPQIIKKIFKVLAGLKQRVIWKWDDLDKLPGKSANILFKKWMPQDDILAHPNIKLFITHAGKGGVTESQYHGKPMLALPVFADQPGNADKLVESGYGLKLDLLTLEVDEFKDAIKELLSNPTYTNKIQHFSKIYRDRPMSARDSVIYWVNYVLRHHGAAHMQSPLVKMGYIATHNIDLYLLLAAILLVIVLISKAVLRFVWSKCCGGRATKQKSSQKTKVKKH

SEQ ID NO: 8453 - protein, 539 aa, Microtus ochrogaster
MSKVFYFSEMSVKQISVFLLIQLICSFRLGTCGKVLVWPTEYSHWINIKVIVDELVQRGHEVTVLTSSASILIDPNSDSSINFEIYPVPVSKEELQYMFQSWVAEWTRDFQKYSFWTYYSKLEEVFSSYSDVIESFCKALVWNKSLMKKLHESKFDVILADAIGPCGELLAELLKTPLVYSLRFCPGYEIEKYSGGLTLPPSYVPVVLSEFSDHMTFVERVKNMLQVLYFEFWFQTFNEKSWSQFYSEALGRPTTLSEMIGKADFWLIRTYWDLQFPHPFLPNFDFVGGLHCKPAKPLPKEMEDFVQSSGEHGIVVFSLGSMVKNISSEKANIVASALAQIPQKVLWRFDGKKPDTLASNTRLYKWIPQNDLLGHPKTKAFIAHGGTNGIYEAIYHGIPIVGIPLFADQPDNINHMVAKGAAIRVDFSTLSTTKLLTALRTVINDPSYKENAMRLSRIHHDQPVKPLDRAVFWIEFVMRHKEAKHLRPALHDLAWFQYHSLDVIGFLLACVAAVVFIITKCCLFCCHKTGNKGKKKKKE

SEQ ID NO: 8454 - protein, 530 aa, Ctenocephalides felis
MRTVLLYLSLLLLIINGQNAEKPKRQKNILCIMAMASPSHHIWNKAIMQTLASNGHNVTALSIDTDKTSGPNIHYLKINGVYESLYSGDEPFDLLEFSKKSLIGITVDIAKWYLTVCRASLKSEGLQRLLDYPKDFKFDLVIFDYTNLPCLHGFVSRFNSPPQIGITAFANPPHTSDLVGSPNFVSLKPHYTTTMGSTMSFLERLYNSLLYSVELVQRRLLIWWVRNEVREVFGDYELDVGDLEKKVELVMVNSHPGMDVPEPVLPNVIQVGGLQIKEPKALPEDLKRFLESSKKGSVLFSLGTNMKSEIIGEEKIGMFIKAISRFPEYNFLWKIELENRTFPKNLMVRKWLPQNDVLAHPNIKLFITHGGLLSSQESTWHGVPIIGMPFLVDQHTNVQKSVDAGVGEKLDFFQLTEEIVYQKIKMILENTSYRQKMALRSSRFRDRPMHPLQEATWWCEYVLRHKGAPHLKSLAAAMEAPALFMWDLMLVWLGMFLGVAFLVVLILKKIFRRKEITNIRRKEFEEKKIR

SEQ ID NO: 8455 - protein, 542 aa, Trichuris suis
MAKAAAMLWLATVVLLSHLVAAGRVLFVPSSVYASHKTIMYHLAEELVKRGHQVSVWGVFLKPDRVPIPKGVEDISWIVKVPESYIQNMFLYENASVYKAVWKDSVSEPARKAANWAMALRMCEVALETRRADFEKLVHRDFDLIIVDDLFAPCGLLLTGLRKGVFVYWSMTHMRTETAWSNHSPSPPSYIPVPGTALTDSMDFLERSFNFLSYMKTLYIHHRIILRSLDIVFKKFYPDIPDAFYIERNASLNFINTPPLFDFPRPFMPRVVFVGGMHCRKAQPLEKKFEEFAGSASNEKGFVIFSTGFSVKWEKVPDKIVAMFVEAFRALPNKVIWQYDGKPISNLPSNVLVDSWIPQQDLLGHPKCRGLITHGGLNSVVESMWHGVPIVGIPIYSEHRDYIVRATARNAGIMLPKSNLSKEAIVDAVQMLTLDSKYKESAVSFMELLQDVPYTELEHAAFWVEFIFRHQEVPHARSGADDLNLLQYFLVDVIAFLVACLIAFAVVAYYCVKYTCRVCSFCGSLFCRLVHTGKSALKRKVE

SEQ ID NO: 8456 - protein, 536 aa, Tupaia chinensis
MFSIVDITMRKKFVQLLVFNWTLTEIVLSGNVLIWPTDGSHWLNIKSILEELIQRNHNVTVLASSATLFINSTPDSTVNFEEIPVSYKKSHIDSLIEHMIMLWIDHRPTPLTLWTFYKELGKLLETFFRINVQICDGILNNPKLMAKLQKASFDVLVADPVTICGDLVAVKLGIPFVYTLRFSPASTVERHCGQIPAPVAYVPAALSELTDQMTFGERVKNTISYPLQDYIFQSYWGEWDSYYSKVLGRPTTLCEIMGKAEIWLIRTYWDFEFPRPYLPNFEFVGGLHCNHSKPLPKEMEEFVQSSGEDGIVVFSLGSMVKNLTDEKANIIASALAQIPQKVLWRYKGNKPAALGANTRLYDWIPQNDLLGHPKTKAFITHGGTNGIYEAIYHGVPMVGIPMFADQPDNIAHMKAKGAAVDVNMNTMTSADLLNALKTVINEPSYKENAMRLSSIHHDQPVKPLDRAVFWIEFVMRHKGAKHLRVAAHDLTWFQYHSLDVIGFLLACIISAMFLVTKCCLFFYKKFHKTEKKKKRE

SEQ ID NO: 8457 - protein, 414 aa, Loxodonta africana
MSTKWISVLLLIQLSCYFSSGICGKVLVWPVEYSHWMNMKTIVDELTQRGHEVTVLTSSASILIDPSKPSAIKFEVYPASLTKDDFEFLFMKLIRKWTYDMPKDTFWTHFSAYNEKKWNQFYSKVLGRPTTLFETMGKAEIWLVRNYWDFQFPRPFLPHFHFVGGLHCKPANPLPKEIEEFVQSSGKHGVVVFTLGSMVSNLTEERAHVIASALAQIPQKVLWRFDGKKPDTLGPNTRLYTWIPQNDLLGHPKTKAFITHGGANGIYEAIYHGIPMVGIPLFADQPDNIAHMKVKGAAVSLDMDTMTSTDLLNALKTVIYDPSYKENAMRLSAIHHDQPVKPLDQAAFWIEFVMRHKGAKHLRPAALSLTWYQYHSLDVIGFLLACVAIVSFLVIKCCLLGYQKFFKAGKKKKR

SEQ ID NO: 8458 - protein, 460 aa, Cavia porcellus
MSLHITPCQMSRKTDNGFTFTAKLLVNLSQNPWFMEEISSAKRNRMIQNISSLQITSVRSIKSGKQCKILQDSINQKRINSDPVAPCGELVAELLKLPFVYSLRFSPGFQLEKSAGGLPFPPSYIPVLMSRLSGEMTFMERVKNMICMLYFDFWIEVFNQKNWNKLYSETLGKPTTFYEQMQKADMWLIRSYWDLEFPRPTLPNFEFVGGLHCKPAKPLPKEMENFVQSSGDHGIVVFSLGSMVSDMSEATANAIASALGQIPQKVIWRFDGKKPDTLGANTQLLKWIPQNDLLGHSKTRAFITHGGANGVYEAIYHGIPMVGIPLFAEQHDNIVYMEAKGAAIKLDFHTISTTDLLNALKKVINNPSYKHNAMRLSSIQRDQPMRPLDRAVFWIEFVMRHKGAKHLRPLAQNLTWYQYHSLDVIGFLLACAAIITFVPIKCCLFCFQKFVKTGKKKKRE

SEQ ID NO: 8459 - protein, 530 aa, Orycteropus afer
MSAKWISVLLLIQLSCYFDSVTCGKVLVWPTEYSHWINIKTILDELIQRGHEVTVLTSSASILIDPNKSSDIKFEVYPTSLTTPDLEILFMKWIKKMTYNMPKDTFWAYFSRLQEIFWEYSDCIERLCKDVVFNKELMIKLEESRFDVVLADAIGPCGELVAQLLKIPFLYTLRFSPGYTLEKLSGGLLTPPSYVPIVLLELYDRMTFVERIKNMIYMLYFDFWFQIFNMKKWDQFYSDVLGKDTTLIETMGKAEIWLIRTYWDFEFPRPFLPHFEFVGGLHCKPANPLPKEFEEFVQSSGKHGVVVFTLGSMVRNVTEERANTIASALAQVPQKVLWRFDGKKPDNLGPNTRLYKWLPQNDLLGHPKTKAFITHGGTNGIYEAIYHGIPMVGIPLFADQPDNIAHMKAKGAAVSLDIKTMTSADLLNALNSVINESSYKENAMKLSAIHHDQPVKPLDRAVFWVEFVMRNKGAKHLRPASLSLTWAQYHSLDVLGFLLACVAIVTFLVIKCCSFGYQKFFKTEKKEKKD

SEQ ID NO: 8460 - protein, 529 aa, Galeopterus variegatus
MSMKWNSVLLLLQLSCYFSSGSCGKVLVWPTEYSHWMNMKTILDELGQRGHEVTVLTSSASIHVDPNKTSTIKFEVYPTSLSRDAFDAFVLMVVKKWERIPKDRIWLHLSEMQEIMWDFSDCMRNMCKDAVLNTKLMRKLKESKFDVVFADAIGPCGELLAEILKIPFVYSLRFSPGYSLEMHSGGLLFPPSYVPIILSELHNQMTFMERIKNMIFALYFNFWFQTFNLKEWDQFYSEVLGRPTVLLETMAKAEIWLIRSYWDFDFPRPLLPNFDFVGGFHCKPAKPLPKEMEDFAQSSGEHGVVVFTLGSMISNMPEERANVFASALAQIPQKVIWRFDGKKPDTLGANTRLYKWIPQNDLLGHPKTKAFITHGGGNGVYEAIYHGVPMVGMPLFADQPDNIARMMAKGAAVRLDFDTVSSTDMLNALKTVINDPLYKENIMRLSRINHDQPTKPLDRIVFWIEFVMRHRGAKHLRVAAHDLNWVQYHSLDVIGFLLACVATVIFAITKCCLLCCQKFAKTGKKEKRE

SEQ ID NO: 8461 - protein, 445 aa, Condylura cristata
MSVKWMSALLLLQLGCYFSSGSCGKVLVWPTEYSHWMNIKTILDELVARGHQVVVLTSSASILIDPSKPSAIKFEVYPTSFSKAEFESAFKQVVSEWTYELPKDSFWSYFSKSQDILWRFFDIVNQLCKDVVKNKKLMTKLQESRFDLILSDPVGPCGRPTTLAETMGKAEMWLIRTYWDFEFPRPFLPNFEFVGGLHCKPAKPLPKEMEEFAQSSGENGIVVFTLGSMVSNMPEERANVIASALAQIPQKVLWRFDGKKPATLGANTRIYKWIPQNDLLGHPKTKAFITHGGTNGIYEAIYHGVPMVGVPLFADQPDNMVHMMAKGAAVRVDFHTMSSTDLLNALKTVINDPSYKENIMKLSRIQRDQPMKPLDRAIFWIEFVMRNKGAKHLRPASHDLTWAQLHSLDVIGFLLACVVTAVYVIIRCFLFCCRKVVKSGKDKRE

SEQ ID NO: 8462 - protein, 474 aa, Branchiostoma floridae
MVPLPVFNSHWMVAASIGQALVNKGHVVTVVVEEDIVEKRRAERPDFTFETFQDDGFGSRLRQFQDDVFRMAESMSASEEFIQHTNAADWAKKHCEHLLGGDNGDLLRRLKTAQYSVVISDPFLRCGTILAANLGIPHVATDPGNNLDDGWFISQMQRLENAYLDVLRNWLYAYIYNDLVRNYVSETDTIHSLTSHTDLWLHQTDTVLNFPRPSMPNIVQVGGLTVRAGIPLSEDLEDFMQSSGDDGVIVVSFGTMVHTMSTERKEMFAAVFAQLRQKVVWRYTGEKPAGLGSSTKLMSWLPQNDLLAHPKTRIFVNHAGLNGVYEALYHGVPMVCLPLFAEQPGNAARVVARGLGVSLDFRTVTSDQLYQALLQVLTNNSYRETAARLSRLHRDQPQSPMERAVWWIEHVIKHGGLPHLRTRAVELPWYQYYLLDVAAFLLGICSAVLGTLWYSCSFVCRKVCCKRDGKLKSQ

SEQ ID NO: 8463 - protein, 529 aa, Cyprinodon variegatus
MKLCLSALVLLLLCAAKISNGGRILVWYTEASHWINMKPVLETLVDRGHQVTVLVPSASMFMNSSEPSRFQYEPFDVAITVKDLEKRLEAVLHFSMHEINVINPVMIPFRFFALMKDNMDVSFKLLDGVVKSETMMKKLKEGNYDLLFADPIYPGSDLTAHILGIPLVFSLRFSIAHNVERHCAQLPAPPSYVPAAMSSLTDKMDFPQRMGNVLFYALQDFLLEQFMWKEFDKYYSEVRGTPTSACKMMGNADFWLLRTYWDFDFPRPSLPNIKFVGGIHCKPAKPLPKEMEEFVQSSGDAGIVVFSLGTVVKNLTTDKANMIASALAQIPQKVLWRYSGEKPQTLGPNTRLYDWIPQNDLLGHPKTRAFVTHGGTNGIYEAIYHGVPMVGIPIFGDQPENMVHVETKGAAVTVNLNSLNADELRDAVNTVINNKSYKENVMRLSRINHDRPMSPRDEAVFWIEFTMRNKGAKHLRVQSHDLTWYQYHSLDVITFFIILDLLLLIILLKTCSFCFKRCCGRKTTKRKAE

SEQ ID NO: 8464 - protein, 525 aa, Polistes canadensis
MRILVSFCLAFIISQSSLIDGYRILGLFPLAGKSHWVMMEALMVGLAERGHQVDVLTQFKIKNPHPNYNEILLKNEVGSPVNNVTAHDTKRFSSLNMEHLTYIAGYKICMLMEQPPIKSIITNPPKDPPYDLVIIELFAAHCYLAFGRHLKVPIVGVMSSPFHDWSSHWIGVPNEGAYVPNIFSGFSQKMSFVERLTNTFMIHFLQLQIDYHVNKQNEITKQYFGIDATTSDLFQDLSLVLVNSHHSLHGIRSFPHSVIEVGGLHLSNNNTDPLQPEVQKWLDDSKDGCIYFTFGSMVRIETFPKEMIEMFYKSFEKIAPTRVLMKVAKKEELLPGLPKNVMTQSWFSQIPVLKHKNTRAFITHGGLMGTTESIFYGIPMIGIPLFGDQSVNIQNYVNRKVAISLGSIYELTEEKLTNALKTILNDPSYMTNIKKLSETFKDRPEPVMNKATYWVEYVIKHKNLLQSPAIFLPWWQRYLFDVYGTIILVLILVTLLVIYLIKLIVKFVFGKNRQKVEKNLKKKKN

SEQ ID NO: 8465 - protein, 529 aa, Vicugna pacos
MKTVKGFCVLFMLHLGFFDSGRAGKVLVWPMDFSHWINLNVILEELHRRGHEITVLVPSPSLLLDHTKIPFNVEILQLPVTKETLREELDTVLYSASFELSNLSWWEMNIKLIKIGQNFFRTIKRVCDSAITNKDLLSRLQAAKFDICLADPLALDGELVAELLNIPFIYSFRFSYGNVIERWCAGLPMPSSYIPGSTSRLTDNMTFVQRLENWLLYTLIDMLYSYYIFPEWDAYYSKVLGKPTTLCETMGKAEMWLIRTYWDFEFPQPYLPNVEFVGGLHCKPAKPLPKELEEFVQSSGEDGVVVFTLGSMIRNLTEEKANMVASALAQIPQKVLWRYTGKKPDTLGANTRLYEWIPQNDLLGHPQTRAFITHSGTNGIYEAIYHGVPVVGMPMFGDQHDNVARVKAKGAAVEVDLPTMTSSDLLRALKEVINNPSYKENAMKLSRIHHDQPVKPLDRAVFWIEFVMRHKGAKHLRPALHDLTWYQNHCLDVIGFLLACVATAVFVITKCCLFCCLKFGKTTKKKKRE

SEQ ID NO: 8466 - protein, 529 aa, Saimiri boliviensis
MSVKWTSVLRLIQLSFYLGSGYCGNVLVWAPDYSHWMNMKTVLNELVQRGHEVTVLAKSSSIVFDPNNPSTLKLEVFPTSLTKTELENIVMQQVKRWSDFPKDSFWSYFSQVQEIMWIFSEISRNVCKDLVSNKKFMKKLQKSRFDVIFADAMFPCGELLAEIFNIPFVYSFSSSTGYVLEKYGGGFLFPPSYVPVVISELSDQMTFMERLKNMIYMLYFDFWFQVFDMKKWDQFYSEVLGRPTTLFETMEKADIWLIRKSWNFQFPHPLLPNIEYVGGLHCKPANPLPKELEEFVQSSGENGIVVFSLGSMVSTMTEERANVIASALAKIPQKVLWRFDGNKPDALGPNTRLYKWIPQNDLLGHPKTRAFITHGGANGIYEAIYHGIPMVGIPLFADQPDNIAHVVAKGAAIRVDFNTMSSTDLLNALKTVINDPVYKENIMKLSKIQHDQPVKPLDRAVFWIEFVMRHKGAKHLRVAAHDLTWFQYHSLDVIGFLLACAATVIFIITKCCLFCFWKFARTGKKGKKD

SEQ ID NO: 8467 - protein, 528 aa, Equus asinus
MSLKWISLLLLLQLSCYFSPGSAGKVLVWPTEYSHWINMKKILDELVQRGHEVTVLTASASILVDPNKPSDIKFEIYPASSTRQEFEDIVRKIINDWTYLTKEPFWTQFSRLQEVLQEFSDYFEKLCKDAVLNKKLIRKLQESKFDLILADAVGPCGELFAELLKIPFMYSLRFVPGHKVEKYSGGLPFPPSYVPAVMSELSDQMTFMERVKNMLYVLYFDFWLQTFNEKQWNQFYSEVLGRPTTLFELMRKAEMWLVRNYWDFEFPRPFLPHFQFIGGYHCKPAKPLPKELEEFAQSSGENGIVVFSLGSMISNMTEERANVIASALAQIPQKVIWRFDGKKPDTLGPNTRLYEWIPQNDLLGHPKTKAFITHGGANGIYEAIYHGIPMVGIPLFADQPDNVVHVKTKGAAVRLDFTTMSSTDLLHALKRVINDPSYKENAMKLSRIQHDQPMKPLDRAVFWIEFVMRHKGAKHLRPASHDLNWFQYHSLDVIGFLLACVATPVFVISKCLVYCWKFAKRGKKEKRE

SEQ ID NO: 8468 - protein, 531 aa, Oryctolagus cuniculus
MSRTCVSLLLLLLQLSCCFSSGSCGKVLVWPMEYSHWMNMKTILDALVQRGHAVTVLRSSASILIDSKNESGIHFETFHTSYTKDEIEGILLNGINILTYDVSRDAYWEYFPLMQKLFYEYSDVYKSICKDLVLNKKIMAKLQESRFDVVLADPFVPCGELLAELLNRPLVYSLRFTPGYTYEKYSGGLLFPPSYVPVIMSDLSGQMTFMERVKNMLFILYFDFWFQMLNAERWDQFCSEVLGRPVTFSELMGKAEIWLIRSYWDLEFPRPLLPNVYFVGGLHCKPAQPLPKEMEAFVQSSGEEGVVVFSLGSMVSNMTEERTNVIATALAQLPQKVIWKFDGKKPDTLGANTRLYQWIPQNDLLGHPKTKAFVTHGGANGIYEAIHHGIPMVGLPLFGEQHDNLAHMKAKGAAIRLDWKTMSSADLIDAVKTVINDPTYKENVMKLSRIHHDQPMKPLDRAVFWIEFVMRHKGAKHLRVAAHDLTWYQYHSLDVIGFLLACVTITTYIVIKFCLLVYQKLFMTGKRKKQD

SEQ ID NO: 8469 - protein, 541 aa, Gekko japonicus
MKSYIPVFILLWNAVGIARTAKIVVVPTVMFESHLYIFKTVASALHEQGHQTVFLLSEGRKIPPSNHYRLLHYPGLFNSTTSDEFLQSKMRNIFSGRHTILELFDILDHYTKNCDMIVGNKKLLQTMKQEKFDLLLVDPNEMCGFVIAHLLRVKYAVFSTGLWYPAEVGAPAPLAYVPEFNSLLTDHMNLLERIKNTLVYLVSRFGVSFLVLPKYERIMQKYNVQPERSMYELVHGSSLWMLCTDVALEFPRPTLPNVVYVGGILTKPASPLPEDLQTWVDGANENGFVLVSFGAGVKYLSEDIAHKLAHALARLPQRVIWRFSGNKPRNLGNNTKLLEWLPQNDLLGHSNIKAFLSHGGLNSIFETMYHGIPVVGIPLFGDHYDTMTRVQSKGMGILLNWKTITEDELYDALVEVINNPSYRQQAQKLSEIHKDQPGHPVERTVYWINYILRHNGAQHLRAAVYTISLYQYFLLDIAFVVLLGAALLCYVLSRIAKFVRKQSKHLWSADEHTAINGHYQNGIPNGKYRRNGHIKHEKKVK

SEQ ID NO: 8470 - protein, 556 aa, Oreochromis niloticus
MERWNRTMLLPSSLLLLLGLLTWSPSTTRAAKVIVVPPIMFESHLYIFKTLATALHKEGHETHFLVSEGREVPPSPHYHLQRYQGIFNSTTADNFLQSKVTNIFSGRLTFLELFDILDHYSQNCDAVVGNTEVMNRLKEAKFDLLLVDPNEMCGFVIAHILGVQYAVFSTGLWYPAEVGAPAPLSYVPEFNSLLTDRMSLMQRIANTAVYLVQRFGVHYIALPKYDRIMKKHGVKPQVAMADLVQGSRLWMLCTDMALEFPRPTLPHVVYIGGILTKPPSPLPQDFEDWVKDTEEHGFVVVSFGAGVKYLSSDIAHKLAGALARLPQRVIWRFSGVPPSNLGNNTKLVDWMPQNDLLGHTNTRAFLSHGGLNSIYEAMYHGVPVVGVPLFGDHYDTMTRVAAKGMGIMLHWKYMTEEDLFTALSSVITDTRYRQQARYLSNIHKDQPGHPVSRAVYWIGYILRHNGANHLRSAVYEVSLYQYFLLDVVITVGAAMALAVFAVRRLARLLRGKSRDHSKGDNVRDDGSMANGHCHNENMANGKHKRNGSLKNEKKIN

SEQ ID NO: 8471 - protein, 529 aa, Condylura cristata
MSVKWTSALLLLQLGCYFSAGGCGKMLVWPTEYSHWMNMKTILDELVARGHQVVVLASSASILIDHSKPSAFKFEVFPTSLSKADFEIAFKQLVSEWTYELPKDSFWSHFSKMQEASWKFVVISRRLCEDVVKNTKLVTKLRESRFDLVLADPVGHCGELLAEVLKVPFVYTLRFSLGYQFETLGGKLPVPPSYTPVVLSELSDKMTFMERVKNMIYVLYFNFWFQSVNFKEWNEFYSEVLGRPTTLTETMGKAEMWLIRTYWDFEFPRPFLPNFVFVGGLHCKPAKPLPKEMEEFVQSSGENGIVVFSLGSIVSNMPEERASVIASALAQIPQKVLWRFDGKRPATLGANTRLYKWIPQNDLLGHPKTKAFITHGGTNGIYEAIYHGVPMVGVPLFADQPDNIAHMMAKGAAVRVDFQQMSSTDLLNALKKVINDPSYKENVMKLSRIQRDQPMKPLDRAVFWIEFVMRNKGAKHLRPASHDLTWAQLHSLDVIGFLLACVVTAVYVIIRCFLFCCRKVVKSGKDKRE

SEQ ID NO: 8472 - protein, 530 aa, Heterocephalus glaber
MFMKWISSLLLLQMSCYFNSGSCGKVLVWPTEYSHWMNMKNILEELIQRRHEVTVLRPSNYIFVDVNSSSGIKFETFTASINRDEWEKYFIQLVTRWINIGPIDSCIPYFSELENMFKEFFDTWQHLCKEIVSNKILMKKLQESRFDVLLSDPISPCGELVAELLKIPFVYTLRFSPGFQLEKFAGGLTLPPSYVPVVMSRLSGQMTFMERVKNMICMLYFDFWFDTFNEKKWNQLYSEVLGKPTTLYKTMAKAEMWLIRSYWDLEFPHPTLPNFDFVGGLHCKPAKPLPNEMEEFVQSSGEHGVVVFSLGSMVSNMTKERANMIASALAQIPQKVLWRFDGKKPDILGPNTRLYEWLPQNDLLGHPKTRAFVTHGGANGIYEAIYHGIPMVGIPLFGEQHDNIAHMMAKGVAVKVEFITLSSTELLNALETVLNNLTYKENAMWLSTIHHDQPMKPLDRAVFWIEFVMHHKGAKHLRPLAQNLTWYQYHSLDVIGFLLSCVATITFLAIKCCLFCSQKFVKKGKKQKRE

SEQ ID NO: 8473 - protein, 514 aa, Halyomorpha halys
MMKASSMPAQLLLFLFFGFELCSASNILVISTVASPSHSIWCNKLAQLLVNRGHMVTVLDADPPRKKVANLTTYTLEGGYEYAEEIDYVKISSEHSPKGAIDFFYSASLTSCRNMLLSPTFKRFLNEHSSNKKPFDMIIHDATNCECFLGLVPYFGNPKLVLVTAYGESQALYVMGSQGHMIHSPFQVTAFSHPMSFVEKLQNMFYSLYNYYEYHKLVNSLDGYTKEVFGQSTPHVLEIAKSAAVALVNAHPILDGAKYYSPAIIHVPGFHIDEPKKLDVETQEFLDGAKHGAIYFSLDTNLKSSLMSEDKINVFLNVFKNLKQRVLWKFEAPSIKNLPENVKISKWFSQNDVLAHPNMKLFITHCGLLSTQEAIYHGVPIISIPFWMDQHSLTDKLLRKGVAIPLSYGGISYNLLQQAIQEILTNDSYTKEMKRWSKLFTDQPMKPKELAVFWIEHVLRNDNHKYLQPPEAFLRTLELIFFDLKTILGICLGLFIAFLASFLKRKEQRKLKKH

SEQ ID NO: 8474 - protein, 238 aa, Galeopterus variegatus
MEDFVQSSGENGVVVVSLGSMVPNITEDRANVIASALAQIPQKVLWRFEGKKPRTLGPNTRLYKWIPQNDLLGHPNTKAFITHGGANGIYEAISHGIPMVGIPLFGEQADNVAHMKAKGAAVRMDFRIMSTTDLLNALKTVINDPSYKENVMKLSRIHHDQPMRPLDRAVFWVEFVMRHKGAKHLRVAAHNLNWIQYHSLDVIGFLLACVTTAIFLITKCCLFFYRKFAKTGKKNKRE

SEQ ID NO: 8475 - protein, 530 aa, Miniopterus natalensis
MLPQKWASVVLLLQLCSAGCGFCGKVLVWPVDMSHWLNIKNILEELAKKGHEVTVLTPAHTKLIDYKKPSPLNFEILHSEYQKESVEKAHEKFLDVILNVLPNLTPWQSTIKLNDVFLEITESVKTLCESAVYNQALMKKLQERNYDVMVIDPVMPCGELVAELLGVPFVLTLRVSMGGMKEKHCGKLPAPPSYVPVQMVGLTDRMTFLERVKNVMFSVLFDFRIRDYDIHFWDQFYSEALGRPTTLCETLGKAEIWLIRTYWDFEFPRPYLPNFEFVGGLHCKPAKPLPKEIEEFVQSSGKDGIVVFSLGSVIQNLTEEKGNLIASALAQIPQKVLWRYKGKKPATLGANTRLYDWLPQNDLLGHPKTKAFITHGGINGIYEAIYHGVPMVGVPMFADQPDNIAHMKAKGAAVEVNLYTMTSADLLHALRTVINNSSYKENAMKLSRIHHDQPMRPLDRAVFWIEFVMRHKGAKHLRPASHDLTWFQYHSLDVIGFLLACAASAIFLITKCCLFSCQKFGKTGKKKKRE

SEQ ID NO: 8476 - protein, 526 aa, Apteryx mantelli
MAGKEVAVLWLLAVLGCGSGGKVLVWPADNSHWLNMDYILQQLVARGHEVTVLLPSCFLILDPSQPSPFQFEVVEVPISKKEMATLLEEAFYFWIYEQNELPIWEAFYKMGQLMIKMRSTNKIICNEVLTNKVLLERLRASAFDVFLSDPLMPGGELFAEKLGIPFVYTFRFSIGNTVERLCGGLPAPPSYVPAILSRQTDSLSFMERLQNIIFYAAMDILYHHALWGEWDQYYSDVLGRPTTLCETMGKAEMWLIRTYWDFEFPRPFLPNFEFVGGLHCQPAKPLPKEMEEFVQSSGEHGIVVFSLGSMVYNLTDEKSNIIAGALSQLPQKVLWRYKGRKPETLGSNTRIYDWIPQNDLLGHPLTKAFITHGGTNGIYEAIYHGVPLVGIPMFADQHDNIAHMRAKGAAVELDFGTLKTHDLVDAVNTVINNSTYKENALRLSRIHHDQPMKPLDRAVFWIEFVMRHKGAKHLRPASHHLTWYQYHCLDVLAFLFTCAAIAVFILVKCCLFCCNKCGRITKKKKE

SEQ ID NO: 8477 - protein, 577 aa, Fukomys damarensis
MSMAWISALLLLQLSCYFNSGSCGKVLVWPMEYSHWMSMKNIIEELIQRGHEVTVLRPSSFIFVDVNSSSGIKFETFPSSVSREQLEEFYSQLLTKLINIGSIDSCLFCFLNSDDFSKAFSDNVHFFCKEAVSNKKLMTKLHESRFDVLLADPIAPCGELLAELLKIPFVYSLRFSPGFQVEKHGGGLIVPPSYVPTMLLGLGGQMSFIERVKNMIGMLLFEGWFEIFNEKNWNQFYSETLGKRTTLYETMAKAEMWLIRSYWDLEFPRPSLPNFDFVGGLHCKPATSALRTTLYETMAKAEMWLIRSYWDLEFPRPSLPNFDFVGGLHCKPAKPLPKEMEDFVQSSGEHGVVVFSLGSMISSMTEERANAIASALAQIPQKVLWRFDGNKPDTLGPNTQLYKWLPQNDLLGHPKTRAFVTHGGANGVYEAIYHGIPMVGIPLFGEQYDNIANMVAKGAAVKVNFITITSTELLNALKTVLNSPFYKENAMWLSTIHHDQPMKPLDRAAFWIEFVMRHKGAKHLRPLAQNLTWYQYHSLDVIGFLLAGVVIITFLVIKCCLICSRNFVKMVKKQKRE

SEQ ID NO: 8478 - protein, 455 aa, Fukomys damarensis
  MOD_RES (210)..(210): Any amino acid
MSMTWISALLLLQLSCYFNSGSCGKVLVWPMDFSHWLNIKIILEELIQGGHEMTVLRPSSIIFADVNSSSQIKFETFPTSVNEDQWKETSTQLITKWMNMGSIEFFFTQCLEAENIFKDFFDSWRNFCKEAVSNKILMRKLQESRFDVLLADAVGPCGELVAELLKIPFVYSIRGTPGFHVERNGGGLICPPSYVPVLMSGLAGQMSFIXRVKNIMHMLYFDFCFAILNEKEWNELYSEVLGKRTTLYETMGKAEMWLIRSYWDLEFPRPSLPNFDFVGGLHCKPAKPLPKEMEDFVHSSAEHGIVVFALGSMVSNMTEERANTIASALAQIPQKVLWRFDGKKPDTLGPNTRLYKWLPQNDLLGHPKTRAFVTHGGANGVYEAIYHGIPMVGIPLFADQHDNIAHMKAKGAAVKVEFLTMSSTELLNALKTVLNSPSYKENAMWLSTIHHDQPM

SEQ ID NO: 8479 - protein, 529 aa, Colobus angolensis
MSVKWTSVILLIQLSFYFSSGSCGKVLVWAAEYSHWMNMKTILEELVQRGHEVTVLASSASILFDPNNSSNLKIEVYPTSLTKTEFENIITQEIKRWSDLPKDSFWLHFSQMQEIMWRFGDISIKFCKDMVSNKKLVKKLQESRFDVVFADPIFPGSELLAELFKIPLVYSLRFTPGYVFEKHCGGFIFPPSYVPVVMSELSDQMTFIERVKNMIYMLYFDFFFQLYDLKKWNQFYSEVLGRPTTLSETMGKADIWLIRNSWNFQFPHPLLPNVDFVGGLLCKPAKPLPKEMEEFVQSSGENGVVVFSLGSMVTNMKEERANVIASALAQIPQKVLWRFDGNKPDTLGLNTRLYKWIPQNDLLGHPKTRAFITHGGANGIYEAIYHGVPMVGIPLFADQPDNIAHMKARGAAVQLDFDTMSSTDLANALKTVINDPLYKENVMKLSRIQHDQPVKPLDRAVFWIEFVMRHKGAKHLRPAAHDLTWFQYHSLDVIGFLLACVATVTFIIVKCCLFCFWNFAGKGKKGKSD

SEQ ID NO: 8480 - protein, 529 aa, Apteryx mantelli
MMGQRFLWLLWAYTCCWSPGFCGKVVVWPTDASHWINLKVLLEELVLRGHEVTVLVPSINMLIDYRDTSSPFTFEVLQVPFTQETLDTIMEDFLNTWVNEFTNLSSWEVLWKMKKDLEVFANMSKMTCDTLVLNPQLMAKLQQAKFDILIADPLYIGGELVAEILAIPFIYSFRFSIANTAERLCGRLPSPPSYVPASMGRLMDRMHFMERLRNFLFYLYTDYFYLEFWRDKWDEYYSDVLGRPTTLCETMGKAEMWLIRTYWDFEFPRPFLPNFEFVGGLHCQPAKPLPKEMEEFVQSSGEHGIVVFSLGSMVYNLTDEKSNIIAGALSQLPQKVLWRYKGRKPETLGSNTRIYDWIPQNDLLGHPLTKAFITHGGTNGIYEAIYHGVPLVGIPMFADQHDNIAHMRAKGAAVELDFGTLKTHDLVDAVNTVINNSTYKENALRLSRIHHDQPMKPLDRAVFWIEFVMRHKGAKHLRPASHHLTWYQYHCLDVLAFLFTCAAIAVFILVKCCLFCCNKCGRITKKKKE

SEQ ID NO: 8481 - protein, 445 aa, Chrysochloris asiatica
MSVKWVPLLLVIQLSCYFSSGRCGKVLVWPTEYSHWINIKTILDELIQRGHEVTVLTSAASVLINPNMASAIKFEVYPTSFNKEEIEISFMSWINEWTRKSKESPWKHFPEIQKIFWEYSDYLERLCKDVVYNKKLMMKLQESRFDVILADAVGPCGKPTTLSETMGKAEIWLIRTYWDFDFPRPFLPHFDFVGGLHCKPARPLPKEMEEFVQSSGKHGIVVFTLGSMVRNITEEKARMIASALAQIPQKVLWRFDGKKPDTLGSNTRLYKWLPQNDLLGHPKTKAFITHGGTNGIYEAIYHGIPLVGIPLFADQPDNIAHMKTKGAAVSLNIDTMTSTDLLNALKTVINDPFYKENAMRLSAIHHDQPVKPLDRAVFWIEFIMRHKGAKHLRPASHDLTWYQYYSLDVIGFLLACVAIVTFVIIKCCLFSYKKLFKRGKKKKRE

SEQ ID NO: 8482 - protein, 279 aa, Myotis davidii
MKKAEMWLIRTYWDFEFPRPLLPHFQFVGGLHCKPAKPLPKEMEEFVQSSGENGIVVFSLGSMVTNMTEERANVIASALAQVPQKVIWRYDGKKPDTLGPNTRLYKWIPQNDLLGHPKTKAFITHGGINGIYEAIYHGIPMVGLPMFADQPDNIAHMKTKGAAVRLDFNTISSTDLLNALKTVINDPSYKENAMKLSRIHHDQPVKPLDQAVFWIEFVMRHKGAKHLRPATHDLTWFQYHSLDVIGFLLACVATATFVIAKCVLFCCRKFFKTGKSKRE

SEQ ID NO: 8483 - protein, 501 aa, Lingula anatina
MFPFTIVFNSRDVHLERIAARLQNEGHEVTLLVANHYKSTRDLAGVTLLRLPALLKAKDDKEDESLISSPLVKVGKDPITCFRDLLEEDLRLCDVLFKDNHVLQKLKEANYSLLLFDWENLGASAILAQFLAIPSISLSYQGFTEYWLITHQPSFYAYTPHYLSRFSDHMGFWERLENVRMMISDNLLYDEFISRAEVLKLRHFPNSSWPHLRYAHERVSMHLIAHAHFAFDYPRPIMPHVQTIPGLLWNPPKPLSKPFEDIMTSATNGVIIVSFGTGFPTLPKAKAEIFAKVFAKLSQTVIWRYVGPPPRSLGNNTHLVKWIPQNDALAHPTTKLFITHCGVSSTWETLYHAVPVVAMPLLWDQYQNARKLTERAKMGQTVSFLTLTETDLENAIEKVLKDRSYKENAQKMSVLLQDTPWTGYEELSYWINYVIRHNGTLFLHSQPQYLLTWYQYFLIDIIVFVTGLCCLVIVGTFICLVGLWQVLKLLLTFPTRKIKNA

SEQ ID NO: 8484 - protein, 366 aa, Propithecus coquereli
MPGKSTLAILLMLLCCAGCGFCGKVLVWPCDMSHWLNLKCILEELIERGHEVTVLTQHQTILIDYKKTSAMKFEVVYRRSTTSCEILGKAEMWLIRTYWDFDYPQPHLPNFEFVGGLHCKPAKPLPKEMEEFVQSSGEDGVVVFSLGSVVQNLTEKTNNLIASALAQIPQKVLWRFDGKKPDTLGPNTRLYKWLPLNDLLGHPKTKAFITHGGANGIYEAICHGIPMVGIPLFADQPDNIAHMKTKGAAVRVDFNTMSSTDLLNALKTVISHPIYKKSVIKLSRIHHDQPMKPLDRAVFWIEFVMRHKGAEHLRVAAHDLTWFQYHSLDVVGFLLACVATAIFLITKSCLFFCRMFATAGKKEKRE

SEQ ID NO: 8485 - protein, 530 aa, Loxodonta africana
MVPEKWVSALLLLQLCWTGCGNCGKVLVWPSDMSHWLNIKTILEELADRGHEVMVLTPSHIFFVDYYQPSTVNFEVIFMEIGRETVEDLLNDFLELAVNIMPNLSSWQSAKKMQDVFLRSTAYLKHLCENVIYNQTLMKKLKEANYNIMIIDPVVPCGDLIAELLAVPFVHTLRFSMGGTMEKNCAKLPSPPSYVPVPMGRLTDRMTFLERVKNVMFSLLFDFWLQQFDTRFWDQFYSEALGKPTTLCETMGKAEIWLIRTYWDFEFPRPYLPNFEFVGGLHCKPAKPLPKEMEEFVQSSGEHGVVVFSLGSMVTNLTEEKANLIASALAQIPQKVLWRYKGVKPATLGANTQLYDWIPQNDLLGHPKTKAFITHGGTNGIYEAIYHGVPMVGLPMFADQPDNIIHMKAKGAAVDMNMNTMTSADFLNALRTVINDPSYKENVMRLSKIHHDQPLKPLDRAVFWIEFVMRHKGAKHLRPAAHDLTWYQYHSLDVIGFLLACVATVIFLVTKCCLFSFQKFRKAGKKKKRE

SEQ ID NO: 8486 - protein, 484 aa, Myotis lucifugus
MPMKWISVLLLLQLSGHFSPGSCGKVLVWPTEYSHWINMKTIVDALVQRGHEVTVLTSSASILIDPNKPSAIQFEIFPTSLTKDDFEDLFKRLISKWTYTPKDTFWTYFSLLQDNTCEYFDCIQKLCKDAVLNKNLMTKLQESRFDVILADPAGPCGELLAELLKIPFVYSLRFSFGYTIEKYSGGLPFPPSYVPIVFSELSDHMTFMERVKNMIYVLYFDFWFQAFSEKWDQLYREALGRPTTLFELMRKAEIWFIRTYWDFEFPRPLLPHFQFVGGLHCKPAKPLPKVIWRYDGKKPDTLGPNTRLYKWIPQNDLLGHPKTKAFITHGGTNGIYEAIYHGIPMVGLPMFGDQPDNIVRMKTKGAAIRLDFNTMSSADLLNALKTVINDPLYKENTMKLSRIHHDQPMKPLDRTVFWIEFVMRHKGAKHLRPAANDLTWVQYHSLDVIGFLLACVATATFVITKCVLFCCRKFLKTGKKKKRE

SEQ ID NO: 8487 - protein, 436 aa, Acaryochloris sp.
MTHIGILCPTLNGHLNPMMALGHELKRRGHRITIVGLLDGKSKVLAAGLEFLAIGEVKFPFGSTSQSLDKLGQLSGIAAFRYSIELMKQATATLLEEAPAALQNMGVEILLIDQALVGGSSIAQRLDLPFISVACALMFNQDSNVPPFFTSWRYSATWWARLRNQIGYQLLSILAQPSTRQIATYRQQWNLPSLKHQNDFYSPLAQICQQPAEFEYPRQSLPAHFYFTGPYSDQNTREPVDFPFDQLTGQPLIYASLGTLQNRLLGTFEIIAEACQVLNVQLVIALGGGSTPESLPILPGSPLVVGYAPQLELLQRATLTITHAGMNTVLESLSNGVPMVAIPITNDQPGVAARIAWTGAGEVVTLKDLTVSRLRSTIRRVLVMKSYRNNAVRLQKAMQTAGGANQAADVIEQVIATEQAVSVQIQASGSFAMSNR

SEQ ID NO: 8488 - protein, 395 aa, Bacillus massiliogabonensis
MSRIVFFSIPAHGHTNPTLPVVAELVNRGHDVWYYSFLEFKEKIEGLGAKFIPCDEYLPPISQEELERKAGKDFAALIEMIVDTTIALDEKVCAELRDFQPDCIVSDSLCFWGKLFAKKLVIPYICSTTTFAFNRHTAKLMKRSLKEIVSMITGMPRINKKLQLLRSHGYEAENFISIIQNDNETDTIVYTSKKFQPMAETFSGKYAFVGPSIGQYSEKASEDRKGRKFIFISLGTVLNQNKDFYQNCIQAFADSDFDVLMSVGEKTQIDSLGRIPANFKVQNRADQLAILQKADVFITHCGMNSVNESLYYGVPMVLFPLHSEQRAVADRVAELGAGIKLKGNKPKQLEKAVAHVLANRTYLENARVLSEDFRNAGGAARAANVIEVKMNGSEF

SEQ ID NO: 8489 - protein, 398 aa, Ktedonobacter racemifer
MKKYIFLNVPATGHVNPTLPIVQELIQRGEQVIYYLTEEFRAAIEATGAIFRPYESFLEGIGPGPMPLKMAEESRRVLPQVLESIRAEQPDALLYEAMCLWGRIVAQVLQVETIVLRASYAANEHFGLFTARSDASMPFPSELLERFQVSSAELSATYHLPPFDLRQFVAHAEGLNVVFLPRAFQPAGETFDERFVFVGPSLLPRQDAPAFPWERLGDQPVLYISLGTAFNHRPDFFRLCFQAFGELPSQVVLSHGKRLDPAVLGPAPANFLLAPSVPQLEMLQRTSVFVTHGGMNSIMESLYFGVPLVVIPQMMEQEITARRVEELELGAALTQENATAEHLREAVARVQQDPSITQYVQAMQQQVRAAGGYQRATDAILDFAYKRASLTHSRSMEA

SEQ ID NO: 8490 - protein, 396 aa, Bacillus sonorensis
MEQRHIAIFNIPAHGHINPTLALTANLVKRGYRVTYPVTDEFVEAIEETGAKPLRYRSTLNMDPRQIREMMKTKDMSEGPLMFKKEVEEVLPQLEAIYEHDKPDLIIFDFMAMTGKILAEKLGIKAVRLCSTYAQNDHFQFSYLSREKYQAELTDEQKEALKNSNLPSFFEEVFKPADLNIVFMPRAFQPYGDTFDERFCFVGPSLSKRKFQEKESTALLHGDDRPVMLISLGTAFNAWPEFYQMCIDAFGGSKWRVIMAVGTTIDPESFANMPENFSIHQRVPQLEILKKASLFITHGGMNSTMEGLNAGVPLIVIPQMAEQEMTAERVNELGLGIHLKPEETTVAILQEAVSEVDGDAELMKRVQDMQKNIKEAGGAEKAADEIEAFLAPAAVK

SEQ ID NO: 8491 - protein, 401 aa, Paenibacillus forsythiae
MKRIHIAMINVPAYGHVNPTLAVVSELVKRGYKVTYPTTEQFLPAISETGATPLLYQLNDTQFDGEQMMEDVKMRNPNLPLTILEQAISFFAQLEQLYKDELPDFILFDFMGLAGKLFAAKHGIEAVRLFSSYALNEHFSFASDFPDETRKAMASVLEACSEKEGIPGLTVEELFRAEKLNIAFLPRAFQPESDTFDERYLFTGPSLGTRSYQESLPLSEIHDRPVLLISLGTVFNPWPEFYKMCIEAFRDSKWQVIMSTGTKIDPETLGEIPGNFIVRQQLPQLEILPHAKLFITHGGMNSTMEALSHGVPMVVIPQMFEQEITARRVTLLGLGQHYLPDEVTVQVLQQSVQEVSEDEQLRKRVYDMQKQIQEAGGAIKAAEGIEQFINETSRQNAHAAH

SEQ ID NO: 8492 - protein, 433 aa, Salinispora arenicola
MLIATTPAPGHVVSMVDVAGELTRRGHEVRWYTGRAFQEQVEQAGARFEPMSEALDFGGRSREEAFPSHAGLTGLASFKIGVRDIFYHTAPGQLDDLLRVLERFPADCILADDMCYGACFASERTGLPMAWLSNSIYILGSRDTAPLGLGLQPSSSPLGRARNALLRFLGDHVSMRDLRREADRTRASVNLPRLRTRAMENITRPPDLYLVSTVPSFEFSRSDLLPGTHFIGGLFGLPPERFEPPSWWQELDGDKPVVLITQGTTANDVDRLLVPAVRALAREDLLVVVTTGSDLDVDLLRPLPGNVRLERFVSYHHLLPRVDVMLTNGGYNGVNAALAHGVPLVAAPATEENPDVAARIAWSGAGVVLARRAVSEATLRNAVVTVLHDERYRQRAHVLSREHQRYDAPRRAAELIEAMAESQGRVPTGGPTQ

SEQ ID NO: 8493 - protein, 393 aa, Lysinibacillus yapensis
MSKIVFFSIPAHGHTNPTIPVVTELVNRGHKVWYYSFLEFQEKIKGSGAAFIACDEFLPNVSQKVLDRKVGKDFAALIEMIADTTIALDEKVCKELREIQPDCIVSDSLCFWGKLFAKKLDIPYICSTTSFAFNQYTAKLMKRNFMEIWRMIVGMPRIHKKMKLLQNHGYDVENFVEIVQNDNETDTIVYTSKEFQPLVHTFSERYAFVGPSIRQTSPIVNDKKDKTVVYISLGTVLNQNRNFYRSAIQAFANTGYEVVMSVGEQTEVSSLGNIPENFTVKNSVDQISVLQATDVFITHCGMNSVNESLYFGVPMVLFPQHSEQRIVADRVAELGAGVQLKGKKPNDLAAAVAEILADLSYYDNAQKLSKTFRNAGGAAEAADVIMAKIEERS

SEQ ID NO: 8494 - protein, 397 aa, Paenibacillus wulumuqiensis
MLRILIVNFPAEGHVNPTLGITEAFASRGDEVHYVTTEKYKERIEAVGATVHLHPDLVRTASIDTGNRESINEFMKIHIRTSLDILELVRQLSATIAFDLVLYDRFGAGELVRDMLNIPGISSSPSFPISNQHMATNLFRPSAESPAPPDEFVAESLSLMKEKYGVAPKEMIQFMNNSGALNIVYTSKYFQPNGEQFEEKNLFIGPSFPERKGSGSFPLEKLQGQRVLYISMGTVLDHIEEFFNTCIEAFSDFDGIVVIAAGEKADLAKINPAPDNFIISPYVPQLEVLRHADVFITHGGMNSVNEGIHFNVPLVVLPQDKDQPMVAQRLTELQAGYRITKDQIHVQSLREAVQEVLSNPSYKEGVHKINQSFEQCGGTEEALRRIDAYLLQRTGAK

SEQ ID NO: 8495 - protein, 403 aa, Paenibacillus sabinae
MKKTHIAMINIPAFGHVNPTLAVVSELVQRGYKVTYPATEKFVSVVEETGASVLPYHSSTTDLLDQLSHIKEINEVISNHSENLPMKFIEEAISTYYQLEQMYADDLPGLILFDFMALGGKLFAAKHGIDAVRLYSSYANNENVSTLHDISDEIKIELASKIKAFSEKEGITGVSFMELFAPEKLNITFMPRAFQLQGDLFDERFLFVGPSIGKRSYEESLPLGENNDRPVMLISLGTIFNPWPEFYKMCIEAFRNSGWQVVMSTGNKISPESLGDIPDNFIVRQQVPQLEVLPQARLFITHGGMNSTMEALSCGVPLVVIPQMFEQEITARRVTELGLGQHFLPDEVTAQVLQKSVQEVSEDEQLQQRVYDMQKNIQEAGGAKKAAEAIEKLLSLSNIQARV

SEQ ID NO: 8496 - protein, 392 aa, Bacillus subtilis
MKKYHISLINIPRYGHVNPTLALVEKLCERGHRVTYATTEEFVPAVQQAGGEAFVYHSSLTIDPKKIKEMMEKNETTLSLLKESFSILPQLEDLYQDDRPDLILYDFIALSGKLLADKLHVPVIKLCSSYAQNESFWLGNKDMLKRIKEAEAEFKAYLEQAQLPAASFEQLAEPEALNIVFMPKSFQIQHETFDDRFCFVGPSLGKRTEQESLLIEKDDRPLMLISLGTAFNAWPEFYKMCLEAFRNSSWQVIMSVGKSIDPESLGDIPAHFTIRQSVPQLEVLEKADLFISHGGMNSTMEAMNAGVPLVVIPQMYEQELTAKRVNDLGLGVYLPKEEVTVSRLQEAVQAVAGDQEVLSRVKNMQKDVKEAGGAERAAAEIEAFMKKSAVPQ

SEQ ID NO: 8497 - protein, 406 aa, Paenibacillus forsythiae
MKKAHIAMINIPAYGHINPTLAVVSELVNKGYKVTYPAVDQFIPVVKQTGASVLPYHSATLDVLDQLNHVKQINEIISSNSENLPMKFLEEAISTYYQLEQIYADDLPDLILFDFIALSGNLFAAKHGISAVRLFSSYAENEHVSALPVISDEIKDQLAAKLKEFTEKEGIPVKHFMELFAPEKLNIAFMPRAFQLQGDLFDEHFLFVGPSIGKRSYNESLPIHENRDRPVLLISLGTIFNPWPEFYQMCIEAFRDSGWQVVMSTGSKISPESLGDIPDNFIVRQQVPQLEILPHTKLFISHGGMNSTMEAMSFGVPLVVIPQMFEQEITARRVSELGLGQHFLPDEVTVQVLRQAVQEVSGDGQLKKRVLDMQKSIQEAGGAARAAEAIEQLINQSSLKNTQVAR

SEQ ID NO: 8498 - protein, 398 aa, Dictyobacter aurantiacus
MTKYAFLNVPAYGHVNPTLAVAHELVERGEQVSYYLTEAFRATIESTGATFQPYQMDEMRPPQGLTANPQNINISHLLGMLLRTSTIILPQVVERLRAERPDCIIYDFMCPAGYMAAQVLGIPAINLRPSYVPSKEMMSRGPLARAQASGSDLAALQEQLDALSARYDLPSMRPMDIWTHHEDLNICFIPRAFQPGGEAMDDERFLFVGPSIFMRQDAPPFELKRVEGQPVLYISLGTVMNNRPDFFRLCFESFADQPWHVVMAHGPRLDLSALGPVPANFQVASYLPQLEVLQQTSVFITHGGMNSTMESLFYGVPLIVVPQQPEQFMTGQRVSELGLGTALKTDELSVAVLRQAVERVSGDPTIRANVEAMQRTVRSSGGYRQAADAITRFAATHS

SEQ ID NO: 8499 - protein, 426 aa, Gloeocapsa sp.
MVHFGILCPAASGHLNPMTALGYELRQRGHQVTVVGLLDAKSKALAAGLDFRAIGEVAFPLGAIPKGVAKLGQLEGLAAFRYTVEFFKQVTLTLLQEAPAALQSAGVKALLIDQTSFGGSTVAEFLDLPFISVCCALMLNRDPNVPPFNTAWNYHAAGWARLRNQLGHELMSRIARPIVNEVVAYRQRWNLPAYCHPNDAFSHLAQLCQQPAEFEFPRQHLPACFHFTGPYSNPASREPSSFPFEQLTGKPLIYASLGTVQNQLLGTFQVIAEACDGLDAQLVIALGGGSKPESLPALPGSPLVVEYAPQLELLQRATLTITHAGMNTTLESLANGVPMVAIPIANDQPGVAARIAWTGTGEVVPLKRLSSSKLRSAIQRVLSEETYRENALRMQVAIRQAGGIKRAIDIVEQVVATGKPVRSRLS

SEQ ID NO: 8500 - protein, 393 aa, Lysinibacillus fusiformis
MSKIIFFSLPAHGHTNPTIPVVTELIKKGHQVWYYSFLEFQDKIEDTGAFFMACDEFLPKVTHIELDRKIGKDFAALIEMAADITIALDKKVCKELMDIQPDCIVSDSLCIWGKLFAEKLGIPYICSTTSFAFNQYTAKLMKRSFMEVWRMILGMRRINRKIKLLNDHGYRVENFVSLVQNDNETDTIVYTSKEFQPMADTFSERYAFVGPSIKQSIPIQNDKRVRKVIYISLGTILNQNQDFYQNCLKAFGKTDYDVVMSVGEKTEISSLDSVPENFIVKNAVDQISVLQKADVFITHCGMNSTNESLYFGVPMVLFPQHSEQRMVADRVAQLGAGLKLNRKTPKYLATAVAEVLTNRVYQEGAQKLSESFRKAGGAVEAANVILRKIGEKS

SEQ ID NO: 8501 - protein, 405 aa, Ruminiclostridium cellulolyticum
MSHVLFINVFGYGHINPTVSIVGELLDRGEKVTYVAGEEFKDKIEHMGARFIGYKNFDELGFNNGEISPAEIEPQLMEISRVYVEIIETVFNIKDNFDYIIYDSLFFLGAEIARVLKIPAISSDSTFAVNDKTNYMSEFFAKFGPVIMGLTSRPDFLSTINYLRDKYGIIVPDLFSIHKLKSDINIIYTSRYFQICGESFDDSYKFVGPSISDRKEKPESTLIYKDKSKLIYISLGTIFNKSVEFYESCFKAFGSMDVKIIMSVGMNIDISSFKNVPNNFIIRNYVPQLEILKYADLFITHGGMNSTNEGLYYSVPLIVIPHFFDQPVVAYRVAELGAGIVIEKDKVSPEILKESVNRIFSNKAYKENSEKIGKSLRGSGGYKKGVDEIFALKDSKKTTGNLIYI

SEQ ID NO: 8502 - protein, 426 aa, Chroococcidiopsis thermalis
MTHFGIICPSSTGPLNTMLPLGQELQRRGHRVTVIGILDARPKVLVAGLEFQVVGEDEFPEGAMAESFAQLGKLSGLAALAYTINLLKNLATVTLRDAPDLLQASNVEALLVNQGSREGGTVADFLGIPFVTVCSAVVLNREPSVPPFNTLWQYSPAWWARLRNRAGYALLNRVARPTRTVIQEYRREWKLPLHAHPNDAYSRLAQISQAPAEFEFPREKLPSWFHFTGSYHSSASREPVPFPYENLTEKPLIYASMGTLQNRLIGIFQQIASACEGLDAQLVISLGGSARPESLPKLPGNPVVVEYAPQLEILKKATLMITHAGMNTTMECLKYGVPMVAIPVTNDQPGVAARIAWTGVGEYVPLSRLNVPKLKAAIQKVFTENSYKQNAARLQQAIQKAGGVTRAADIIEQAISTGKPVLANVS

SEQ ID NO: 8503 - protein, 402 aa, Tengunoibacter tsumagoiensis
MTKFLYCAPPRYGHVVPMLAIVKEMIEQGAEITYFCTEQFAEAIQETGATFKPYKTTLIEDAHMQNIAELDFESSDPTVNESFYVLPQLIEVARAEKADCLIYDDFCLWGRILAQILRLPAIIMLSSYARNEQFNHFDYFRKRLQIDIPTIIATEDVRQSLVKLCETYKIEPFPFEDIFFHTEPLNLIRIPREFHPMGETFDEKRFKFVGSTIRSHEDIGDFPLDRLSKEPVLFATLGTVFTEVSGMFDLFLSAFGHQSQQLVIAIGKNIDPSVFGPLPENVILHPHVPQLTLLRHTDIFISHGGLNGVMEALANGVPMIAIPQVGDQVATAFRLQELKLGIMLDPSIVTVHTLRTAISILKKDPAYRANAQRMQKIVQQLNGARDAAREILDYSHSLFVNK

SEQ ID NO: 8504 - protein, 426 aa, Pseudomonas monteilii
MTHFAVVAPAYASHFQAFEVLSGALLDRGHRVTFFHQVDAARWLQDRRIGFQPIGVDSRPPGTLDAQLRLAASPSTPWALHRLIRQLADTSRLFIEHLPAAFAAQHIEAVLCDQMEGAGGLVAEALGLPFVSLACALPVNREDGLPLPVMPFAPGQAPYSLRRCHASTQVYDWLMKPVDAALMQGARRLGVPPRRGLHAYLSPWLQLSQTPAALDFPRQSLPAHFHPVGPLRRATPDRPGAWPIDPNRPLVFASLGTLQGGRLRQFQRIARACRALDVQLLVAHCGGLDPAQEATLQRCGATWVTDFAPQRWILEQADAVVTHGGLNTVLDAIVAHTPMLVMPIAFDQHGVAARVAHHRLGLSLSRRASTRRIADALRQVLALPTQAHARQAEALAASGGAARAADLIEAALGVPASSPLETVDDL

SEQ ID NO: 8505 - protein, 395 aa, Paenibacillus sp.
MLHILMVNFPAEGHVNPTLGITQAFAARGDQVHYITTEKYKDRLQAVGATVHLHPDLIRTASIDTSTPAGLNAFMNIHIQTSMDILAITKQLSESIDFDFVFYDRFGAGELVRDYLNIPGIASSPSFLISKNQMASNLFRSDAKVPFQLNEQAATSLELMKERFGVAPESMVQFMNNTGALNVVYTSRYFQPDAERFGEESLFIGPSFPERKGEHSFPLDRLQGKKVLYISMGTVLDHIEDFFNTCIEAFSDFEGIVVIAAGEKADFTKINPAPEHFIISPYVPQLEVLRHADVFITHGGMNSVNEGIHFNVPLVVLPQDKDQPLVAQRLTELQAGYRITKDRIHVQSLREAVHEVMSNAAYKEGVQKINDSFQQSGGTEEALAKIDAYLQKELA

SEQ ID NO: 8506 - protein, 405 aa, Ruminiclostridium papyrosolvens
MSHVLFINVFGHGHINPTISVVSELVDRGEKVTYIAGEEFKDKVESAGARFIGYKNFDELGFNNGDISPAEIQPQLMEITRVYVEIIEVIFSIKDKFDYVIYDSLFFVGAEIARILKIPSISSNSTFAVNDKTNYLSTFFTRFGPVIKELLNNPDFQGTIHFLREKYGVNVPNILDMHKMKSDLNLVYTSRYFQINSEGFDDTYKFIGPSISDRQEILEPELISKEKSKIIYISLGTIFNKSVEFYESCFEAFIGMDAKIIMSVGMNIDIDSFKDIPDNFIIRNYVPQLEILKHADLFITHGGMNSTNEGLYYSVPLIVVPHFFDQPVVAYRVAELGAGIVIEKAKVSPALLKASVTKIFSDNAYKENSEKVGKSLRESGGYKKGVDYIINLKDSKEAAGELIYS

SEQ ID NO: 8507 - protein, 401 aa, Unknown
  Description of Unknown: Actinobacteria bacterium OV320 sequence
MTSRPAHIAMFSIAAHGHVNPSLEVIRELVARGHRVTYAIPPVFAEKVAATGAEVKPWHSTLPAPDDDPSAWGSTLLDNVEPFLADAIQALPQLIEAYDGDEPDLVLHDITAYPARVLAHRWGVPAISLSPNLVAWEGYEEEIAEPMWAEPRETERGKAYYARFHAWLEENGIAEHPDSFAGRPARSLVLIPRALQPHADRVDESVYTFVGACQGDRAAEGEWTRPERAEKVVLVSLGSTFTDQPDFYRECVRAFGEMPGWHLVLQIGRHVDPAALGTVPDNVEVRSWVPQLAVLRQADLFVTHAGAGGSQEGLATATPMIAVPQAVDQFGNADMLRGLGVARQLATPEATAATLREAARALVDDPETARRLKVIQEEMADEGGTRRAVDLIEAELMRQRS

SEQ ID NO: 8508 - protein, 394 aa, Bacillus sp.
MEQKHIAIFNIPAHGHINPTLALTKKLVERGYRVTYPVTEEFTTAIEETGAKPLQYRSTLNIDPRQIREVMKNKETAQQMPEMFKKEVDEVLPQLEAFYENDRPDLVIFDFMAMAGKIMAEKFGVKAVRLCSTYAQNDHFHFRAMAETIQMGKNAEQLPDLNNANIPYFEEIFQPANLNIVFMPRAFQPYGDTFDERFRFVGPSLAERKFQEKDIPLVKDDGRPVMLISLGTAFNAWPEFYEMCIEAFRDTKWQVIMSVGRTIDPESFKDVPENISIHQHVPQLEILKKAKLFISHGGMNSTMEALNAGVPLVVIPQMPEQEITARRVEELGLGKHLQPEETTVRSLQEAVSKVDDDAQMLNRVKDMQKNIREAGGAEKAADEIEAFFKLLTVK

SEQ ID NO: 8509 - protein, 395 aa, Lawsonibacter asaccharolyticus
MYRIAFFSIYAHGHTNPTLPVVRELTCRGHQVRYYSFAPFREKIQAAGAQFVPCDSYLPPAPPDLERRVGRDFAALVEMITQTLLAMDGPVGRDLAQFQPHCVVSDSLCFWGKLWAAKLACPYVCSTTTFAFNRHTAKLMKQTPGQFLRLLTGRGRIRRCMAQLCQAGYPMKGLLSLIENDGHTDTIVYTSWEFQPLADTFSSRYAFIGPSVPELTHAPRSGGDRQIYISLGTVNNRSRSFYRACLEALRSWEGVRAVLSLGGGCRPEELGDVPPNVQVFPQVDQLAVLSQSDAFLSHCGMNSVSESLYLGVPLVLFPQQEEQGMVARRVQELGAGIPLPAPTPAAIHQALSLVLADPAFQHSAQHISEGFRAAGGYRRGADNILEAAMGSAPLP

SEQ ID NO: 8510 - protein, 433 aa, Geitlerinema sp.
MSHIGVLCPGAIGHLNPMCNLGGELIRRGHRVTLFGVPEVREKIARSSLEFCEIGASDFPPGSIDKMYAQLGKLTGTEGLKFAIQFFQDEAKMLFRDAPSAIRNVGIDILLVDQVTGAGGTIADYLQLPFITICNALPIQQEPSVPPYFTSWEYSDTRLARLRNRLGYRLVNFFTRELWDTFVQQRKQWNLPPHAQRSDSYSGLAQIAQLPQELDFPRKQLVPWFHYAGPLKNPLEIEPVSLDQQHFSFDSLSNKPLIYANLGTLQSHNWKIFHAIAEACLGIDAQLVISLGNPKADPSQTNFPGNPLVVPFPPHQQLINRAELVITHAGSTAVSCLSSGVPMVAIPITTDQPGMAARVKRVGAGEVVPLKKLSVSHLRTAIQQVLGDRAYRENAARLQTAIQAAGGVNYAADVIEQVIRTQAPALNPRLQPS

SEQ ID NO: 8511 - protein, 399 aa, Steroidobacter sp.
MKSRHIAVFTLLTNAHLYPVLGVCSELVNRGHRVTFATNDRYAPVVKQTGAEVVIFKDVKVENAAAFSTASAFYDQNFYTIWASIVGPFLILFAASAFPQLENYYKENKPDLILYDRACFVGRMLAARLGCSAVQLSPHFAPYGDTFIRENGVFLNPSPIPSFSQVLDCFLQAYGVQSKNNLTHAADLNIFFIPREFQFHGDSFDDRFCFVGPCLNRPAASEWRNNSGGKPIILVSGSQADEGTTYFRTMINAFSGSDFHVVLSPGANVSDDLFGPLPSNFELNRVAYNFQIIPHSTLTISQGGTGTVMETLYYGVPLLAVPRMPVHAETAYRLAELGLGGYLPEQMMSADSIREQVTQLLGDTSLASRIARMQHIVRDSGGAKIAANRIEQCLGSRPS

SEQ ID NO: 8512 - protein, 404 aa, Paenibacillus durus
MKKTHIAMINIPAYGHINPTLAVVSELVQRGYKVTYPATEKFIPDIEQTGVSVIPYHSASMDILDQISHVKQITEAISSNAENLPMKFIEEAISTYYELEQIYADDLPDLILFDFIALAGKLFAAKHGIEAVRLFSSYAENEHVSALPEVSDEIKNELAAKLKDFAEKEGIPVASFMDLFIPEKLNIAFMPRAFQVKGDQFDEHFLFVGPSIGKRSYDESLPIDENNERPVMLISLGTIFNPWPEFYNMCIEAFGGSNWQVVMSTGSKIIPESLGDIPDNFIVRQQVPQLEILPHTRLFITHGGMNSTMEALSNGVPLVVLPQMHEQEITARRVTELGLGQHFLPDEVTVQVLQTAVQEVSEDEQLQQRVYDMQKNIQEAGGAQKAAEAIEKLLHSQKNTQVTH

SEQ ID NO: 8513 - protein, 389 aa, Holdemania filiformis
MAIIAFFCLPAYGHTNPTLEVVRELTKRNHQVVYFSFSPFQQRIEEAGARFINCDAELSMDKAGAMAANSDVGGSIKLLTDTTLALDKKICETLQALQPDCIVADSMAVWGKFAALKLGIPLISSTTTFAFNRYSAKIMKQSFGQLFSLICSMPQIRRQIRRLREHGYPVKNLLSILQNDDQTCTIVYTSREFQPYAETFSDRIQFVGPSLRQISTEAADARTAVYISLGTVNNQHPDFFRNCVEALRDYPGEVIMAVGTENQAAALEAPAHFTIRPQVDQLEVLQKAALFLTHGGMNSVNEGLYAEMPLILYPQTAEQGGVARRVVQLNAGILLEENSPAAIRRAVNQVLTNPVLKENAAAISRSFRQAGGAVRAAQLIEGWIQEKKN

SEQ ID NO: 8514 - protein, 395 aa, Bacillus massilionigeriensis
MSKIVFFSIPAHGHTNPTIPVVSELVNRGHEVWYYSFTEFQGKIEGAGAKFISCDKFLPPISEEELDRKVGKDFAALIEMVVDTTIALDEKVCTELKEFQPDCIVSDSVCFWGKLFAKKLGIPYVCSTTTFAFNQYTAKLMKRGFKEIVRMIFGIPRISKKMKLLRNHGYQVDNFISIIQNDNETDTVVYTTKEFQPMAETFSDKYTFVGPSIRQSSEMPVDKKGSKVIYISLGTVLNQNKDFYQHCFEAFADSDYEVVMSIGEKTEMASLGHIPDNFSIQKYVDQIAVLQRADVFITHCGMNSVNESLYFGVPMVLYPLHSEEGAVANRVAELGAGIKLQGSHSKNLEKAVAELLTNPSYLGNAQKLSVNFQNAGGAGEAADVILAKAERKPYK

SEQ ID NO: 8515 - protein, 395 aa, Micromonospora aurantiaca
MPHIAMVSIPFHGHVNPSLEIISTLVRRGHRVTYANDPAFAEVVRATGAELKPYASTLPADGGAGIDDPIAQLTLFLDDAVAMLPQLRTAYADDRPDLFLYDIAGAPARLLGEQWGIPAVQLSSTFVAWDGYEQEMAPAVEAMRADPRGADYYQRFTAWLTAEGSSVTDSMAFQGRPVRSLVLPPEALQPNADRVDRSVYSFVGPVLGDRSDQGSWVRPERADKVLLVSLGSAFTRQPEFYRRCVAAFGDLPGWHTVLQIGKHVDPAELGPVPDSVEVHRWVPQLAVLEQADAFVTHAGMGGSSEGLYCGTPMIAVPQAADQFANAEQLASLGVARVVDSATVTAAELRETLLALTADPAVVARSAELKRQARAAGGADRAADLIEAELATASGG

SEQ ID NO: 8516 - protein, 439 aa, Variovorax paradoxus
MARYLIAATALPGHVLPMLAIAQHLVNQGHEVRVHTASQFRAQAEATGASFTPFERAIDFDYRDLDKRFPERQRIASAHAQMCFGLKHFFADAMAAQHAGLSSILEDFEADAILVDTMFCGTFPLLLGKAREDRPAIVGIGISALPLSSCDTAFFGTALPPSATPEGRVRNKAMNANLKQAMFGEVQRYFDTLLARSGLPALPDFFVDAMVKLPDLYLQLTAPSFEYPRSDLPASVHFVGPLLSPASRDFTPPEWWHELDDGRSVVLVTQGTLANQNPSQLIGPTLQTLAGDKNILVIATTGGPVPPALTVNLPANARVVPFLPYDRLLPKLHAMVTNGGYGSVNHALSLGVPLVVAGTSEEKPEIAARVAWSGAGINLATGQPTARQVGDAVRKVLGNSSYRQRAAVLREDFACHRALTGIAGALEALLQTSASAEMA

SEQ ID NO: 8517 - protein, 300 aa, Paenibacillus zanthoxyli
MMNILMVNFPAEGHVNPTLGIVKAFADRGDNVHYITTEKFKERLSFLMPEKEFKNILGPDSFQPDENAERLLDQMKEKFDVLPKNMLQFMNNSGDLNLVYTSRYFQPHNELFGENYVFIGPSFPQRKTTDHFPMEVLKDKKVLYISMGTVLDHVEEFFNTCIDAFSDFEGKVVIAAGEKADFTKIKEAPENFIISPYVPQLEILSQSDVIVTHGGMNSVNEAIHYNVPLVVIPHDKDQPMVAQRLTELGAGYRISKDNINVSSLKNAVNEVLSNSEYKEAIQKIKDSFHMCGGPEKAIEV

SEQ ID NO: 8518 - protein, 392 aa, Bacillus halotolerans
MRQHHISIINIPAYGHVNPTLALVEKLCEKGYRVTYATTEEFAPAVKQAGASPLLYQTTINVEPERIREMIEKNETPISILKESFEILPQLEDLYQNDQPDLIVYDFIAFAGKLFADKLNVPAIRLCSSYAQNESFQLGSEEMLKQLKQAEADFQVYLEKENLPAVSFEHLAIPEALNIVFMPRSFQIKNETFDERFCFVGPSLGKRGEQESLLPETGNRPLMLISLGTAFNAWPEFYRMCIDAFRNSDWHVVMSTGISIEPDSLGDIPDNFTVRQRVPQLDILAKADLFVSHGGMNSTMEAMNAGVPLVVIPQMYEQELTARRVDELGLGVYLPKEEVSVSRLQKAVQDVSRDKEMLNRVKDMQKDVKEAGGAEKAAAEIEAFIKKSVVPQ

SEQ ID NO: 8519 - protein, 396 aa, Streptomyces sp.
MTSHIAFFNFPAFGHLNPTLGVVAELVKRGHRVTCTTTDHFAPAIESLGAEAVRYNSVFGQYYTNPFTAEAISGEGLRTLEESLSLVDQVEGFYQDNRPDVILHDFMAWGGRFYGATRDIPVMRLFPSYGMNEHFSIQAKFPMAEFSDPLVMEMIARLDEKLPDLGFPGKTAMEFFMEPPQRGIIFLPRDFHYDGDTFDERFVFAGPCLGDRSGFQGSWQPASQDRPVLLISLGTAATGWPEFFKTCVEAFTGSRFDVVMAVGDNLDPAELAPLPANFEVRRSVPQLDVLRHADLFITHGGMNSVMESLYNGVPMVVSPQMSEQRANGLRVEELGFGRMLTREDFGLESLRKAVDEVSADRAIADRTRAMGERMRQVDGPAVAADAIESYVAASGR

SEQ ID NO: 8520 - protein, 393 aa, Streptomyces otsuchiensis
MAHIAFFNFPAVGHVNPTLGVVEELVKRGHRVTCTATEFFVPAIKAAGATPIVYESPFGEFYRSPYNDEMMAGEGLRCLDEAIALHQQVSGYYGDDRPDVVVHDFMAWGARFYASEHELPAVRLFPSYGVSETFNIAAKYPWSAPDDPRILEMIERITALLPTFGLPGDMGAFVTDVAETGVIFLPREFHYEGDTFDDRFVFAGPSIKDRSTFQGSWKPKSAERPVLLISLGTASTGWPEFFSLALQAFGDSHRDVVMALGDHIDPADLGDVPANFEIRRHVPQLDVLRHADVFLTHAGMNSTMESLYHGVPMVAVPQMNEQRANALRVEELGLGRHLPREEVTAESLRASVDAVAADAAVAERVRAMKEALRAVDGPAVAADAVERRIVANG

SEQ ID NO: 8521 - protein, 403 aa, Unknown
  Description of Unknown: Pseudonocardiaceae bacterium YIM PH 21723 sequence
MTKHIAIICMPAHGHLTPVLAVTRELVNQGYRVTIPTLEEHRAQVEASGAAAPLYHSPLVEQFAAKKDEMRDAPPAEFKVEEILPMFFGEAGATAPQFVELFENDRPDLLVYDQITWAGALVADRWQVPHVILYPSTVPTQGSNAFRDMVEQIADPGTAAAVQGALDTARAGSGLEPLPVLDFLGTQPELGIAFMTRSFQPEGETLDDRYQFVGPCLGDRISNTGWQPKDAERPLLYVSLGSGFNNQPAFYRTVIEAFRDEPWQVVLVTGQSVQLSELGDDLPDNFEFHAFAPQLEILPHATVFLTHNGMGGTQEGLSFGVPMLGLPQMSEQETNADRVVELGLGRRLPAKPTAAELRAAVAEILEDPDIHKRLEAMKWDIEAAGGTKRAADLLADAVRRFQA

SEQ ID NO: 8522 - protein, 390 aa, Bacillus sinesaloumensis
MSKIVFFSLPAHGHTNPTIPVVTELVKKGHEVWYYSFSEFKQKIEDAGATFIGCDDYLPRVSEAEVERKVGKDFAALIEMVADTTIALDKMVCEELQELQPDCIVSDSLSIWGKLFAKKLDIPYISSTTSFAFNRYTAKTMKRGFKEIWRMIVGMRRIQAKIKQLNEHGFKVENFVSLVENNNDTDTIVYTSKEFQPMAETFSERYAFVGPSIRESVPTQHKENRKIVYISLGTVLNQNQDFYENCIKAFADADYDVVMSVGEKTDITSLGNIPEHFTVKNTVDQIAVLQEADVFITHCGMNSANESLYFGVPMVLFPQHSEQRMVADRVAELGAGVMLKGSKPNDLATAVADLLGNPSYQKHAQALSESFKKAGGAERAANVILAKIND

SEQ ID NO: 8523 - protein, 403 aa, Unknown
  Description of Unknown: Pseudonocardiaceae bacterium YIM PH 21723 sequence
MSHFAFACMPAQGHLMPLLAVTRELVGRGHRVTIPTTKEFQQQVEASGAAAPLYEQPSNREFGDDPDLMREAKPDSFPLAAVFRMFLDEAAGVAPQVKSILDGDRPDLFVYDQMTWAGWLLADKWRVPHVMLFPSLVTGQQRPSFAAGIEQMSDPETRASLDDAVAATRAALDLPPAALSEFGAHEPELGIAFLPKAFQPDAEQIDERYEFVGPCLGERTGTTGWQPPAGDLPLVYLSLGSAFNQQPTFYRTVIEALRDEPVRVEMAIGEQVKPEELGEIPANFRLHGFAPQLEILPHASVFITHCGMGGTQEGLSFGVPLIGVPQMFEQQMNAERVVQLGLGKHIPPAEVTADRLRTAVRELLADPEIGGRLTAMRAAIQTAGGSARAADVLEHALTQYANR

SEQ ID NO: 8524 - protein, 393 aa, Paenibacillus sp.
MSKIVFFSIPAHGHTNPTIPVVAELVNRGHQVWYYSFLEFQEKIEGAGAAFIACDEFLPQLSQKELDRKVGKDFTALIEMVADTTIALDEKVCQELREIQPDCIVSDSICFWGKLFAKKLEIPYVCSTTTFAFNQYTAKLMKRGFIDVWRMIVGWPRMNRKIQLLKNHGYEIGNVVSIVQNNNETDAIVYTSKEFQPMADTFSERYAFVGPSIRQSPPIQINKKDRKLIYISLGTILNQNQDFYQKVIQAFADTDYDVVMSVGEKTEIASLGNIPRNFTVNNVVDQISVLQTADVFITHCGMNSVNESLYFGVPMVLFPQHSEQGLVADRVAQLGAGLKLKGKKPKYLAAAVSEVLTNRTYQENAQKLSETFQNAGGAVEAANVILTKIRAKS

SEQ ID NO: 8525 - protein, 400 aa, Deinococcus maricopensis
MSIVAVFTLSALGHVHPTLPIVAELVRRGHRVVYYCGEAVRQKIEATGAEWRAVPWDFTPVERAPRPRLSAYALEQARCAETLLPQLLKELQDLNPACVMVDFMCFWGRIVARTLQLPTVNLSSSFALGPGVLPPRPVLMALDLAGAPLQGAREVLAVRRTTQRLSRQYRQADLRTQFDLLSMDGDDVLVCTARAFQPHAERFGERFQFVGPSVAPRAREATTDLPRLDERPLVYVSLGTVFNHKLDFFRECVHAFADGQYQVILSVGQSTDPAALGPLPPHMHARAYVPQLDVLARAAVFITHAGMNSVSEAMAHEVPVVAVPQAADQFTIAQRVAALGVGRNLLPFQRRARHLRAATDALVADAAVRSRCRALRQAFEQAGGPTRAAAVIEARMAGQA

SEQ ID NO: 8526 - protein, 406 aa, Ktedonobacter racemifer
MSNIVYLSLPAHGHVNPTLPVVQELVQRGEQVTYYSASEFCPQIERTGATFRAYPITEMTSTAFSAILQDGNLALVVRLLLHTTEQLLPFLLDELSREQPDLVVFDSNALWGNMAATLLKLRPAASIPHLVFDGTEARKAPHARQQIFRLLPMVPDLLSVRRRLIRRYGKAAFPSSRPLFPMRGGLNIVFTSRELNPDVPLIDQTFRFVGPSINPQTRDGDFPFDALGLQPVVYISLGTVHSTRSEFYRQCFEAFAGYPAQFILSAGTHTDIKELGAIPPNFIVCPFVPQLEVLQRVDAFITHGGLNSIHEGLYYGVPLILIPQQLEQFLNAKAVAARGAGLVINDQLMHGHVRASTLHQAAEVILADPRYREAAGALQKTLHTAGGYRQAADEIQRYLAREGVQT

SEQ ID NO: 8527 - protein, 422 aa, Caulobacter sp.
MARFLFTTWEGGGHVQPMLLVARELAARGHQVLALSDPCNAPDAAALDVPFRAWTTAPFQTGKTRDDDRLKDHQADSPLEVIQRLLDRVMTGPALAYARDTLAAIDAFAPDVVVSQELLFGPMAAAEARGLPLALLAANVWSLPTMSGAPPFGAGMLPAANDEERAMHAMVGQMSRGFYQAGLPDLNAARAVLGLVPLSDLFDQLGAARAILLATSRAFDFAPSPLPAPFAHVGPYLTDPAWVEAFEPPKGEAPLVVVSFSSLYQAQEPVLRSVITALSDLEVRAVVTTGPTIDPEQFQAPPHVMVVRSAPHGALLDDAAVFITHAGHGSTLRPLMAGVPLLCLPMGRDQHDNAARAIHRGAGLTLPADSKPELIGAAVRQLLDEPHFKIAASALGSAILAEARPDSASTTLEALLFEAQKN

SEQ ID NO: 8528 - protein, 422 aa, Dictyobacter sp.
MSTYLCFNIPQSGNVNPTLAIVQGLITRGEYVTYYLTREFQRPIEATGALFRSYTSNLDFSAIITAMSSKSSTERFLMLSESMLHESRAILPQILNDLQGWRPDGIIYGQSALWGRMLAQILHVPAISVRSSYATNQYFHLFSPLLPAVNPLEAERVKQRQDSLNRQLHSLCREYHIPTFDFTDIFSHAEPLTLVTMPRAFQYAGNTFDNRFKFVGPCILPRHDNSGFALERLGNHPILYISLGTSFNQQPDFYQTCLKAFANTPWQVVMSIGTHVTPAELEPIPENFIIRPYVPQLDILSRTSIFISHGGMNSTMEALSYGVPLIIIPRIQEHELTARRVVELGLGMELEPENVTAESLREAVNTIAHQPEIRMRTRQMQRTIAETGGVHAAVDAILQYLHTRRHSGSPLDCAQFTSETLS

SEQ ID NO: 8529 - protein, 425 aa, Solimicrobium silvestre
MTEKTIALFPEASYGAALNCLGIAQELLKQGARPVFICHPGFHGVFAEYGFPEYRLFTEQESDDAGNIDWTKFVQQHREAFRTSAFEQIDSYIAPTWEAVVASVIRIEVPLRQLLSRLKPAAIVVDNVIAFPAVINSGIPWVRVVSCAETEITDPDIPPYLSGCASKDRADWEQFSEHYASAIAPIHERYMTFLRSCDLAPFQNDEFMETSPWLNLLLAPKILRHQRQNPLMPDKFIFLEGCVRTEVPWHAPRFASHNDKPLVYTSFGSLGAMDIELFERMIQVFATLPYRFIINVGSWREHYQTTPDNVYLDSWFPQPSVVRETQLFIHHGGNNSFCEALYFGVPSLIMPYCWDGHDNAQRAQETGVGKHLPRYEWSDEQLRATITALIDDQAMHKRLQLNAKHMQASNGAQVAAAAILHAIKE

SEQ ID NO: 8530 - protein, 408 aa, Streptomyces libani
MSAFAATPQRHVAVFLFADFGHISPTLGLTRELIRRGDRVTYFVDHQYSEVVERTGARVVGYKSRRGAFVKVPQAGAARLAAEGYELLVESMQTVYPLALSTLAADPPDVVLYDFESFPAARMTAHTLGCATTVQLGISHASNEEFSLRVLLFDPDDPSLREGGAALMRFARDNGIPPEGLGRFLREWDEHNLAFLPREFQIKGTTFDERFHFVGPTVAEPEGDVPWSPPADGRRLALVSLGTESNQQRDFFRTCVDAFDGDDWHVVMTLGRDADLAALGDLPPHVEAHRWLPHPAVLPHADVLVCHGGMSCLMEALYFATPAIVVPQAFEHTLTARRVDELGLGRMIDRDRLTTDTLGAAVDDIVADPEIPEHMAWMRASVHGAGGAPRAAGLLEQWAGRPAPTPAA

SEQ ID NO: 8531 - protein, 217 aa, Paenibacillus polymyxa
GALNVVYTSRYFQPDADSFGEENLFIGPSFPERKGEHSFPLDALQDKKVLYISMGTVLDHVEDFFNTCIEAFSDFEGIVVIAAGEKADFTKINPAPEHFIISPYVPQLEVLRYSDVFITHGGMNSVNEGIHFNVPLVVLPQDKDQPMVAQRLTELQAGYRITKDQINVQSLRDAVHEVMSNAAYKEGVQKINDSFQQSGGTEEALAKIDAYLQNKLV

SEQ ID NO: 8532 - protein, 270 aa, Unknown
  Description of Unknown: Actinobacteria bacterium OV450 sequence
IDQLAAVLAAHGLQSFTRRRLLSPPRRALALFPRAFQRSPDTVPILCDYVGPAYAKRQLSKDWPRTRDGRPVLLISLGTLYDNDLPFFRMCIEALGDTRWHVIMKIGRRVDTAALGALPRHFEVHYSVPQFDILAGADLFIGHGGMAGVMEATVHSVPIVAIPQVAEQRVTAEQVALNKIGVHLPRQLVTASSLRDAVLRAASDPDIVHGIAVMQRHIQRSGGAPAAADLIEKLLPHGWPPGNRPPPLPVCSRSGDPLPIVPKVTSGMEE

SEQ ID NO: 8533 - protein, 390 aa, Lysinibacillus timonensis
MSKIVFFSIPAHGHTNPTIPVVAELTKKGHQVWYYSFLEFQQKIEDASATFIACDEFLPKVSQEELDRKAGKDFAALIEMAADMTIALEEKVCRELKEIQPDCIVSDSLCIWGKLFAKKLGIPYICSTTSFAFNKQTAKLMKQSLSEVWKMIVGMPRIHKKVKLLNDHGYRVENFVSLIENDNETDTIVYTSKEFQPLAETFSEHYAFVGPSIRKFAPVQNDHKTKKLIYISLGTVLNQNMDFYQNCMKAFSNTNYEVVMSVGDKTDISSFGSIPHNIIVKNTVDQISILQKADVFITHCGMNSTNESLYFGVPMVMFPLHGEQKMVAQRVFELGAGLKLKKLNPKMLAITVAEVLTNPSYKNCARKLSESFKRAGGGKEAANVILDKIS

SEQ ID NO: 8534 - protein, 552 aa, Anopheles gambiae
MLVLAYDLRSPTMTTQHWIALTLALAICNVHAENILFLQTTPSKSHHIWNRQIFDRLYENGHNLTILSFEQETSVPGKTFLVMDGYYAKMMAAFADSAGDFSSYEHAFGNIMNVYQYYKVASGLLEEEDAIQRLLAYPRTFRFDLVIHDFTMGQWLLGFLEHFHNPPLVSISPYNIPSYTQYLADVPVYTTYLPHPASSFGTRMTFVERVQNTLYWWFDMLYRQQVYMPQEQQRLVRVFEGANRTHVKLLERRSELVLVNSDPALDFYQLLPPNVVQVGGLHIKRAEEMPPVSLEGQFIARANKGVVLFSFGTNVQSEMLGAEVNRQLLELFASMPDYGFIWKHANADGLIMPPNVLMAPWVPQSAVLANGRTKLLVSHGGLLSLQEAAWNGVPVIGVPFFADQFSNVRRIELAGIGIGIPSTQLNAVTLKEAMDKILSDSSYRARSKELSYRFRTQPEPPLERAIFWIEKTIANKGLRYLRSPTRSMAPYQVYGLDMVGVVLLIALGYYLIFKLLLRCCIQLVFCLLLSTVGSRNRTVGARSPAVYCAAAN

SEQ ID NO: 8535 - protein, 407 aa, Unknown
  Description of Unknown: Actinobacteria bacterium OK074 sequence
MHATPRTPRRRAHIAMIGAPMVSHVRPSLDIVRELVARGHRVTYANDPATAELITPTGAELVPVPSELPFADGDWPEDPIAAMRLFLDDAVRALPRLRAAYDRDPADLYLYDIAAYAARALAEAQGRPLAQLSPTFVGWAGYEDEVAAHVWKLPGADAYRARFTEWLAGSGASTLDMDVFAARPAHTLALIPRAMQPHADQVDTDTVTFVGPCFNLREEEASWVRPADVTNVLLVSLGSAYTRQLGFYRRCLAAFGGLPGWHVVLQVGKHTDPRDLGPIPSNVEVHSWVPQRAVLARADAFVTHAGMGGCGEALLAGVPMIAVPQGAEQFTNADRLVELGVARRLDTADATAEALRAALLALTGDPEVARNSARLRADALAEGGTARAADFVEGLMEGLVEEAPGPR

SEQ ID NO: 8536 - protein, 402 aa, Paracoccus tibetensis
MARIAFCLPAMRGHLGAHAPLAREMARRGHEVVLLGSRALPPLVQGLPVRAMDWTEPQLSGAGLARTLWATAAATRGVVRHAPAALAALAPDLAVTDHAEPGYALAAEAAGIRRITLTPGLPILRNDAVPPPFLPWPFDPSEAGRGRNRGGWKVSGALMALQNRALAQGCRQHGLAPRAGIDDWSADVPELRQMIPALDFPQDWPANAVPLGPLRDDPRAGLPPLPDQPVIFASLGTLAGRRKRLLHAICAAAAPLDVTLILTHAGALTSAEIAALPGRPLVRDLWPQTAVLARASVCITHAGLNTVLDCIAAGVPMLAMPLAFEQPGIGARIAHHGIGLTLPPRQRDVAAIRAALTRLLGERAFRDNLSRPRAELRAAGGVRRGADLIEKMIRGRAAGDAA

SEQ ID NO: 8537 - protein, 402 aa, Bacillus thuringiensis
MANVLVINFPGEGHINPTLAVVSELIQRGETVVSYCIEDYRKKVEATGAEFRVFENFLSQINIMERVNEGGSPLTMLSHMIEASERIVTQIVEETKEEKYDYLIYDNHFPVGRIIANILQLPSVSSCTTFAVNQYINFHDEQESRQVDEMDPLYQSCLAGMERWNKQYGMKCNSMYDIMNHPGDITIVYTSKEYQPRSEVFDQSYKFVGPSIATRKEVGSFPTEDLKNEKVIFISMGTVFNEQPALYEKCFEAFKDVDATVVLVVGKKINISQFENIPKNFKLYNYVPQLEVLQHADVFVTHGGMNSSSEALYYGVPLVVIPVTGDQPFVAKRLTEVGAGIRLNRNELTSQLLRETVKKVMDDVTFKENSRKVGESLRNAGGYQRAVEEIFKLKMKPYVKIK

SEQ ID NO: 8538 - protein, 398 aa, Streptomyces sp.
MPPHRSHIAMIGVPIVSHVLPGLAIIRELVARGHRVTYANDPFVADRIEATGAELVPCSSVLPVADDNWPTDPVAAMDLFLDEATQALPQLHAAYDQDPADLYLYDIGAYAARALAESQGRPLMQLSPSFVAWEGYEQEVAAHLRALPGASAHRERFGRWLAGCGATTLDVDAFSGPPARALALIPKAMQPSADRVDPDTVTFVGPCFDARADTDRWTRPRDAEKVLLISLGSAYTHRPEFYRQCLAAYGNLPGRHVVLQIGRHTDPRELGDIPPGVDVRSWVPQRAILEQADAFVTHAGMGGCGEGLLAGVPMIAVPQGAEQFMNADRLVELGVARRIDTPDATAKTLRAALDDLVTDPETARRSARLRAAARSEGGTPRAVGLIEAMVAREGVGSR

SEQ ID NO: 8539 - protein, 392 aa, Streptomyces tubercidicus
MAKHLLFVALFGHGHVNPTLPLVEELVRRGHRVDYATTAEHSEAVIKAGAHWVELKLQSPALLTPPHNFGLDKIPGWMRGMFAEMRTLHPVLRDYCAAESPDAICYDSMNWPARVAAEQLGLPAVRFVPNLASNEAFSLFDNLMNEVGDEDPMLAALAADCAEFSAENGVTLAPELVLNFTEKLNLVFIPREFQPAGDTFDDRFHFIGPSLGEREHAEPWSPADPDAPVLFISLGTVFNDRPEFFRTCIEAFGDGPYQVAMAIGDLDRADLGEIPPTFDVRPYFPQPAVLRHADAFVSHAGMNSTMEALYYGVGLITVPQMPEQAANAGRAQELGLGVQLDTATVTAESLRAAVARVTSDATMRTHLDRMCKVTRDSGGAVRGADVIEEYIR

SEQ ID NO: 8540 - protein, 414 aa, Unknown
  Description of Unknown: Mycolicibacterium gilvum PYR- GCK sequence
MAVILAYTAPALGHLFPFCAVLQELARRGHDIHVRTLAAGLQICRDEGFTAAAVDPRIEAIQADDTLTGTVRAAADTVEVLTARAPLEVADLLSAVESVQPDVVIVDANCWGAMSVAETLGRPWVVLSPFTPYLRSPGAPPFGPGATPWPGPLGRIRDWGIGLVTTAVFDRPFARQIAPLRRALGLTPVRTAGDLLLRAPAVLVATGKPLEYPHTDWGETVTMIGPAVFEPRAAQRPSWLDHIDDPIVLVTTSSVGQSDAALVETAVEALRDEPVHLVVTAPTGDVDVMTRPGVTQVRFAPHSMLLEHAVCVITHGGMGVTQKALARGVPVCVVPFGRDQFEVARRVELAGCGTRLPAGKLSVGRLRTAVKTAATMTGGAARVAAGFAATGGVARGADVVESRLVARCALPEEQ

SEQ ID NO: 8541 - protein, 392 aa, Bacillus subtilis
MKKYHISMINIPAYGHVNPTLALVEKLCEKGHRVTYATTEEFAPAVQQAGGEALLYHTSLNIDPKQIREMMEKNDAPLSLLKESLSILPQLEELYKDDQPDLIIYDFVALAGKLFAEKLNVPVIKLCSSYAQNESFQLGNEDMLKKIREAEAEFKAYLEQEKLPAVSFEQLAVPEALNIVFMPKSFQIQHETFDDRFCFVGPSLGERKEKESLLIDKDDRPLMLISLGTAFNTWPEFYKMCIKAFRDSSWQVIMSVGKTIDPESLEDIPANFTIRQSVPQLEVLEKADLFISHGGMNSTMEAMNAGVPLVVIPQMYEQELTANRVDELGLGVYLPKEEVTVSSLQEAVQAVSSDQELLSRVKNMQKDVKEAGGAERAAAEIEAFMKKSAVPQ

SEQ ID NO: 8542 - protein, 394 aa, Bacillus amyloliquefaciens
MRKTHIAIINVAAHGHVNPTLPVAEELVNRGYKVTFATTEEFEASVAKTGAIPVLYRTSIKADPKTIKERVNKSDAFVMFLEEAVEVLPQLEELYKDDLPDIVLFDFLALAGKLFADNGGIPAVKFCPSYAMNEYFQLGRDEETMEAAKQAIEEYQEKIENEQVKRMTMEEFFMPEKLNIVFMPRAFQPKQETFDERFCFAGPSLGERTNTGSLEIDAADDRPLMLISLGTAFNAWPEFYRMCIDAFRDSDWRVIMSVGITIDPESFSDVPDHFIIRQHVPQLDVLEKAKLFVSHGGMNSTMEAMNAGVPLVVVPQMHEQEVTAKRVDELGLGVHLPPKEVTVARLQKDVQNVYGDKNILSRVKSMQQKIKETGGPKQAVCAIEEFLKTASVEN

SEQ ID NO: 8543 - protein, 402 aa, Tengunoibacter tsumagoiensis
MATYAFFNVPAWGHVNPTLAIVQELVARGHAVSYYLPEEFRATVEATGATFQPYVSRIGHAWTKGFADTEKGGGIIRTILADKETVGPQIIDRLRAERPDVIIYGYMCSWAKGVAEELAVPAISTRATYASNDHFDAFRDMRTRLQGAAILEEFSKLSGANAEHDSSPSSPQAELLRLTAVVEPLNIIVMSSIFQPLQETFDDRYLFIGTSILPRHQESDFPFDQLDRNRPLLYISLGSIMTNQPAFYKLCFEAFGDQPWQVVLPIGRHTDRAQLEPVPSNFILAPSVPQLEILPRTRLFVTHAGTNSIMESLFFGVPMVLIPQQPEQYMHALRAVELGLGVQLDKNTLTASALRQAVESVADNSSYQEQAHHVQNIVQADGGYQRAVDAIIQFTRTHAKHS

SEQ ID NO: 8544 - protein, 390 aa, Lysinibacillus acetophenoni
MSKIVFFSIPAHGHTNPTIPVVEELTKRGHEVWYYSFTEFLQKIEDAGATFIACDEYLPNISQEEIDQKAGKDFAALIEMAADTTIALDEKVCKELKEIQPDCIVTDSLCFWGKLFAIKLGIPYISSTTSFAFNKHTVKLMKQSFMEIWRMIVGMPRINKKIKLLNEHGYRVKNFVSLIENDNETDTIVYTSKEFQPMAETFSNHYAFVGPSIRQTSPIQKNHNSRKLIYISLGTVLNQNKDFYQNCIKAFANTDYEVVMSVGEKTDISSLGPIPENMIVKNRVDQIAILQKADVFITHCGMNSTNESLYFGVPMVMFPQHGEQKMVANRVSELGAGTSLKKQNPKMLATAVAEVIANPLYKENAQKLSESFRKAGGAKEAANVILNKLS

SEQ ID NO: 8545 - protein, 429 aa, Streptomyces laurentii
MTERRLTVLFVPESAYGPTNNCVGIGDVLRRRGHRVVFAAEASWKGKLTALGFEEDLVALAPPPEGEQEAGQFWKDFIRDTAPEFRKPTIEQLETWVKPVWEELVAGVRYCEPHLRRIIERVRPDVIVEDNVVCFPALLTAGTPFVRIMSCNPLELRTDDVPPVFSGHPSADRTGWAEFREAYDRSHRALWEEFNAWVVEQGAPALPELDFIHHGATNLYVYPEAADYARTLGPAWHRLDSSVRETDGTFELPAELRNGDGALIYFSLGSLGSADLGLMRRVIGVLAGTPHRYLVSKGPLHEEIELPPNMWGAEFLPQTSILPLVDLVITHGGNNTTTEALHFGKPMVLLPLFWDQYDNAQRMDELGFGVRLDTYRFTDGELKGTLERLLADDALRERLAGVGEEIRRRDGLRKAADLIEGAATPATGR

SEQ ID NO: 8546 - protein, 407 aa, Paenibacillus sp.
MNHLYTPNTGDGSQRKHIAVVNIRAHGHINPTLGIVEELVKQGHRVTYVVTEEFVSVIEATGAEARIYQSLFPANLTMKRQPMEDMAFGMDLFFNEAQQMFPQLEAIYEDDKPDLVLFDFMAWIGSVAASKWGVPSIQLCSSYPHDKQDPMYEEMMKMPEFAAHAEKVARYIHDLQIEELTMESLMFKQELSIVFMPRQFHYEGDSFDERYQFVGPCLRTEHNQTGWSPPTDDRPILYISLGTVFNDWPEFFNQCMEAFGSTSWHVVLVVGKHLATEQLQTVPDNFEVHATVPQLAVLQHAKLFISHGGMNSTMEAMLHRVPLVVIPQMQEQERTANRVATLGLGYYLKPEGVTVEKLREAVQTVAGHECMLERVKQMSQHIHAAGGTVRAVELIEQRLLMAEVVAK

SEQ ID NO: 8547 - protein, 396 aa, Unknown
  Description of Unknown: Bacillus subtilis group sequence
MEQKHIAIFNIPAHGHINPTLALTKKLVERGYRVTYPVTDEFVAAIEETGAEPLQYRSTLNINPQTIREMMKNKEDMPQAPKMFMKEVEEVLPQLEELYQHDRPDLIVYDFMAMTGKLIAEKLGVEAVRLCSTYAQNEHFQFKDLVERMQIEKVGQQVSDLKNANFSTARFEELFEPAKLNIVFMPRAFQPYGDTFDERFRFVGPSLAERKFQNNNEQLVKDDGRPVMLISLGTAFNAWSEFYSMCIDAFRDTKWQVIMSVGAAIDPESFEDIPDNFSIRQSVPQLEILKKAKLFITHGGMNSTMEALNEGVPLVVIPQMPEQEMTARRVEELGLGRHLQPEATTVQRLQEAVSQVDDNTELLNRVKDMQENIKEAGGAEKAADEIEAFFKPITVN

SEQ ID NO: 8548 - protein, 397 aa, Ktedonobacter racemifer
MAKFLFCNVPRYGQVNPTLAVVQELAVRGEQVVYCLTEDFRRAVEATGARLQPYRSTMFGFSSPSAPRGPYSSSTPARLVEESRYVLSQLRDVVRMEKPDCVIYDPASLWGYVLAQMLGVPAIQFRPGYVFNEHFQFASELWEGAAESIHPHPFEQVNNDFEALCRVYGVNAFPLQEMYARVEALNVISIPKAFQPAGETFDERFRFVGPSIVSRLTTSEFPLERINSQPALYISLGTVFNNRVDFFNTCFEAFGGSAWQVVQAIGQRINRSQLNEIPGNFMVYPFVPQLEVLQYTDIFITHGELGSIMESLYYGVPLIVVPQTSEEAITARRVEGLGLGLSLDTGELHADVLKQTVNRIASDSSFRVNTKRMQRALREGGGYHAAADAIVDFNQRR

SEQ ID NO: 8549 - protein, 390 aa, Oceanobacillus bengalensis
MSKIVFFSIPAHGHTNPTIPVVYELVQKGHEVWYYSFLEFQEKIEGAGATFIPCDEYLPKVSQEEIDRKAGKDFAALIEMVVDTTISLDEKVCADLKKSKPDCIVSDSLCFWGKLFAMKLGIPYFCSTTSFAFNQYTAKLMKPGFIEMTRMIVGMPRINKKLKLLRDHGYEVDNFVSIIQNDNDTNTVVYTSKEFQPMVETFSDKYAFVGPSIRMSSEVIEAKNDKKLIYISLGTVLNQNIKFYQNCMKAFEDKEYEVVVSVGKRIEISSLGHIPDNFVIKNEVDQIAILQKADIFITHCGMNSVNESLYYGVPMVLYPLHSEQRVVANRVSELGAGMKLKRMRTKNLAEAVETVLADSKYLKNAEKISDTFQIAGGARKAADFILSNLE

SEQ ID NO: 8550 - protein, 425 aa, Pseudomonas fulva
MSHFALVAPPYPSHFAAMQALGGELVERGHQVSFFHQPEAERWLSDSRLGFVAIGHAECPPGSLDLAMRRVADPAGPLRLRRLIKQLAHTTGMLISNLPQALRDHRVDAMICDQMEPAGGLVAEACNLPFFSVACALPINREPGLPLPVMPFGLGLDARLYEGSAQVHDWLMRPLHDTLVQACHRHGLPPRSGAHEFLSPLAQLSQTPLHLDFPRADLPKHFHAVGPLRSTPSQASPNWSFESGKPLVFASLGTLQGHRFDLFARIAKACRGLDAQLLVAHCGGLDAHQQARLRQIGATVVTDFAPQHWAVRRANVVISHGGLNTVLDTVCAGTPLLVMPIAFDQPGVAARVRHHRLGRVLSKRASASAIGQALRQLLDEAAPRDAALEAELATCGGVQRAASLIEAALRSGQPSISEKVPCPMT

SEQ ID NO: 8551 - protein, 424 aa, Cronobacter muytjensii
MSHYAVITPPLYSHVHAMQALAQELLARGHRITFIQQAEARTLLDDPRIGFYPVGEQSHPPGSLARTLRLTAHPGGPAMLSLIHDLARTTDMLCRELPDALTRLGIDGLIVDQMEAAGGIVAEALGLPFVSVACALPVNREPGLPLPVMPFRYAQTPRARKIYHAGQQVHDWLMRRHGAVIAHHAQRFGLAPRHGLHDCLSPLAQISQTLGALDFPRHSLPACFHAVGPLRPPQPTVSEPLPDAARPRVFASLGTLQGHRYGLFRTIARACRDAGAELLVAHCGGLNPAQAAKLEACGATRVTAFTDQPLALSQSHAVITHGGLNTVMDAVASATPLLVVPLAFDQPGVAARVEYCGIGRRVSRFAGRRAFTRQLQALLGDASCRTRLAAMQRALAQAGGATRAAQVTEQALQERRPVIAQARP

SEQ ID NO: 8552 - protein, 418 aa, Frankia sp.
MARYLVYCTTAPGHLFPLVPGLRALRDRGHEIHLRIGARLVDGPWADGLNVAPTDPRIDEIEVKADASGTGPAQLRRALAGLMSRGPLERADLERAVAQVDPDVILVDTNAYGAAIAARASGRPWGIVLPSLVALPGKGIPPYGLGLAPGRGPLGRLRDRVVWPLVIRQFGAAMLPPLNAMRADAALPPLTSPIDYFLEADRLLVLTGDPLEYPRSDAPEHVRFVGAQIYDPPGEAPAWLAEDGDPWVLVTTSTDYQGDERLAVAAVEALRDEPVRVVITLADAYGHVELPAAANVRVERFVPHGPVLERAAAVICHSGMGIVHKAIAAGVPVVAVPFGRDQPEVARRVVEAGAGVMLPARRLTAERLRDALRTAMSRRAGALNAARRIRASGGGESFATEAEGLAAAPRPAAARPAA

SEQ ID NO: 8553 - protein, 408 aa, Dictyobacter sp.
MKYILANVPGFGHVNPTLPVVEELVARGEEVVYYVPDTFKEAVESVGATFHPYELDLSNMVPPTGMGLGGPMSGIQIQNALPFRMIKESQRILPQVLEQLRQERPDAILYDAMCLWARIAAQVLHIPAIQLRPSYAINEHVKLFPMGQGNGAGSPIPPPFIQQIREDIAELCKQYQLPPFDLQSTLGHAESLNIVFMPRAFQPAGETFDERFVFVGPSLRPRHEKSDFPLQELAGEPVLYISLGTVFNNQLEFFKGCIDVFGNTDQKVVLSYGKRIQPAELGPLPANFIAAAYTPQLEVLAHTDVFVTHGGMNSTMESLYNGVPMVVLPQMIEQQMTARRVSELGLGVMLESSPDATQKLREAVEHVRQDASFRARAREMQRTIQQTGGYREAADAIMDYTQKTLQRA

SEQ ID NO: 8554 - protein, 431 aa, Granulicella mallensis
MARIGFLCLSATGHLNPTMALAKALQDRGHEPVFFNMIDNARKITELGLGFVPYGLTEYPEGTLKLIFEKISKLKGIEGFQYFMERMLVQAQVSFRELPQSITEAKIDALVIDQLFPGGATVAQHLGLLYASLANALAVNHEDGVPPPTLPWGYEETAAAETRNAAGWKQIAQAFTPWRECDNAQRALWDLEPYNDVLEDSFSPFAQIANQPQAFDLPRKNLPESFYYAGPLLHAAARQPLQFPWGQLDGRPLIYASMGTLQNGLDWAFRAIVAACVGLDAQLVLSLGGGVLTSTELGELPANAIVVPYAPQPEILERAALCITHAGLNTALESLTYGVPMVAIPVTNDQPGVAARIRYTQTGEVIALDQLTAEDLREQIVKVLDDPAYRERALQLKRDFASERPLVRACEIIESEVLSKIAASEADMARI

SEQ ID NO: 8555 - protein, 426 aa, Oscillatoria nigro-viridis
MTHFGIHCPVDTGHLNPMTTLGCELLRRGHRVTVFNFLDAKAKTLATGLEFQPFAEQEFPVGWFAEILSQRGKLSGLAALRHTFKAVAKTSDAILREAPMAIKKAGVEALLVDQVCIEGGTIAEFINIPFITVCSALLLNRDPNIPPICTLWQYDPTWKGRLRNQVSYQLLSLLARPIREGISEYRRKWKLPLHSHPNDYYSKLAQITQQSAELEFPRQNLPPHFHFTGPYHNPATRKPVPFPFEQLTGKPLIYASMGTIQNRLLDVFQTIASACEGLDAQLVISLGGGATPESLPPLPGNPIVVGYAPQLELLQKAALTITHAGMNTTLESLSNGVPMVAIPVANDQPGVAARIAWTGVGEVVALKELSVSKVRSAIVKVLTQESYKQRAIEMQEAIGRSGGVKRAADIIEQAVLTGKPVLASKI

SEQ ID NO: 8556 - protein, 389 aa, Eisenbergiella sp.
MGRIAFFNIYAYGHTNPTLEVVRELAGRGHAIRYYSFAEFRDRIEAAGADCVCCDEYMPPVPADIDKKVGKDLASLLSMTVHVTLAMEDRVMEDFRKWRPDCIVSDSICIWGKLYAGKLGIPYVCSTTTFAFNRYTAKLMKQKPGDLFRMMTGMREIKERMKELRQHGYGVDKFYELIQNDNDTDTIVYTSREFQPMADTFSSRYRFTGPSLSVPSPSRAVNGRPVIYISLGTVLNKQEGFYRSCMEALKEEDADVIMAVGMHTDISSLGSIPANFRIEPRVDQLRTLQQARVFITHCGMNSVSESLYFGVPLVLFPQQPEEGAVARRTQELGAGILLKNIYPAAVKDAVRQILEKEDYRDCARRIGDTLRKAGGAAKAADGIEAVLRR

SEQ ID NO: 8557 - protein, 398 aa, Paenibacillus curdlanolyticus
MARVLFINAGSEGHINPTLGVVQELVSRGEEVVYFCTEAFRERVEKTGALVRTFDDQKFIKAFIAGGRNYLLERVNGLLLTADVVIPAVLEQIKGETFDYIIHDAMFGCGRLLAQILKLPAISSCTSFAQTKVAFDQSLTHLYRTAPAEIVQSIEDSYQSLTAMIKQQYGVEIDSPYEVFCNPAPLTIVYTTRAFQPEGEAFDLSYKFVGPSIALRSTQESFDLAAIEGKRPIYISLGTVFNGSIGFYKLCLEAFGHTEHTVVMAIGNKVQVSDLGEVPSNFVVQSYVPQTDVLAQAKLFITHGGMNSTHEGLYYGVPLVVIPQGADQPIIAGRVVNIGAGIELQMKDLTANQLREAAEVALSTTASKEAAAHMGESFRSSGGYRQAVDEILGFASGI

SEQ ID NO: 8558 - protein, 425 aa, Trichodesmium erythraeum
MTHFGLICPALTGHLNPMLPIGQELKRRGHRVTTIGILDAEAKTLAAGLEFVAYGTEEYSKGSTAEALNHLSKLSGLAAFRYTITLLKDWTNVLLRDAPQVIKNAGVDALLIDQASLGESIGDFLDIPFITICSALVLNQDENVPHPVSNWKYNPAWWAKLRNRATWSFYQILGKPINKVVAEYRRQWNLPLYSDPNDAYSLLAQISQQPAELEFPRENLPKCFHFTGPYHYSGTREPVSFPWEQLTGKPLIYASMGTIQNRLVEVFYQITAACEGLDAQLVISLGGSATPESLPNLAGNPLVVEYAPQLEILQKATLTITHAGMNTTLECLSNAVPMVAIPIANDQPGVAARIAWAGAGVAITLKRLTVPRLRTAISQVLTQPSYKQNALRLQKAIKRAGGVTRAADIIEQAVSTGKPVLTGTI

SEQ ID NO: 8559 - protein, 425 aa, Oscillatoria nigro-viridis
MTHFGIICPAANGHLNPMTTLGSELLRRGHRVTVFNLLDAKTTTLASGLEFQALAENEFPAGSMAEGLAQLGKLSGLTAFRYTIKAFTEISAALLTEAPTAIQKAGVEALLVDQVSFEGGTIAEVLNLPFVTVCSALMVNRDHNIPPFCTPWQYNPTLANGLRNQVSYELLNLAVKPIRDVIAQYRKEWKLPLYSHPNDGYSKLAQISQQPAEFEFPRQNLPPHFHFTGPYHNPATRQPVPFPFEQLTGKPLIYASMGTIQNRLLDVFQTIASACEGLDAQLVISLGGGATPESLPPLPGNPIVVGYAPQLELLQKAALTITHAGMNTTLESLSNGVPMVAIPVANDQPGVAARIAWTGVGEVVPLKELSVSKVRSAIGKVLTQESYKQRAIEMQGAIGRSGGTKRAADIIEQAVLTGKPVLAGK

SEQ ID NO: 8560 - protein, 400 aa, Tengunoibacter tsumagoiensis
MKKYLFCAPPRYGHVNPTLAIIKTLVAQGAEVVYFCTEMFAGIVQSAGATFRPYLSTNLELATDPTASLESSDPIINECFYVFPQIVELARLEHADCIVYDEICLWGRMLAETLHLPAIKYMTTYARNEHFSYQTYANKFRNMYFPATLVASDVRKGLERFCATYNITPSITYENIFLHAEPLNIVFMPRAFHPLEETFDQERFKFVGPPIRTEDSPTNFPVDKLSNQPVIYASRGTVYNTIAGIIDIFLNAFGHREQQLVVALGPHIDPRVFGPLPENVLLHAQIPQLTVLRHTDIFITHGGMNSTMEALANGVPMVVFPHSGEESATAYRIQELKLGIAIDHNSMTVHTLRTAVETIQNDPEYRLNARRMQHILQQTTAVQDAVQEITAYGQKTVAHT

SEQ ID NO: 8561 - protein, 394 aa, Actinopolyspora sp.
MSSHVAFFNFPVIGHLTPSLGVVEELVRRGNRVTSTVTDYFVPVVEAAGAEAVRYRSEFGEYYTSPFTQEAISGEGLRTLNEATSALEQVEDFYRQNRPDVLVYDFMAWGARFLASRLEIPAVRIYPSYAANEHFSIQEKFPMAEFTDTEVVELIDQLEELLPSMGMPEMMAMDFFTQQEKLGIVLLPREFYYEGDTFDDSFVFAGPCLGDRSFQGGWSPSSRDDPVLLISLGTAATGWAEFFRMCVQAFVGTEWNVVMAVGDHIDAADLAPLPGNFEVRRHVPQLDVLARADLFITHGGMGSTMESLYYGVPQVVIPQMSEQTANAMRVEELGLGKHLPRDETTVESLREAAATVSEDPSVGGRLRTMRQAVRALDGPRIAADAVENFMKGAR

SEQ ID NO: 8562 - protein, 419 aa, Dictyobacter alpinus
MSTYLCFNIPQHGNVNPTLAIVQGLITRGEQATYYLTPEFRDPIEATGALFRSYTSSLDFNAMIAAMGSQSSTERYLTLSENILQECRALLPHILNDLQGLRPDGIIYGQAALWGRLLAQIMHVPAISVRSSYAINQYFQLFAPSPPTLEPEKAEQNRQRRDSINDQLNSLCREYHITPFDFTDIFSYAEPLTLVTMPRTFQYAGNSFDNRFKFVGPCILPRKDNTHFPLEHLGNHPLLYISLGTSFNNRPKFYQVCLNAFANTPWQVVMATGTQVTRAELGPIPENFIVQPYVPQLEILARTSIFINHGGMNSTMEALSFGVPLISVPQIQEHELTARRVVELGLGMELGPELVTAESLQMAVANIAHQPEIRMRTRQMQHIIAETGGVHAAVDAILQYLHTRQAYRHVTSFAPKSGF

SEQ ID NO: 8563 - protein, 430 aa, Gloeothece verrucosa
MAHFGLICPAAPSHLNTITTLGYELKQRGHRVTLLGVEYAKQKALAMGLEFQETGKTDFPEGSTQKIISKLSNLHGIKALRYSFAIGVKAARTCLEDAPKAAQTAGIEAMLVDQCAPEGGTVADYLGIPFVTICNGVMTNQEIGVPPFITSWNYDPSWKGLLRNKVGYELLNYLEKSLRETINSYRKQWNLATFSNFNESYSSLAQLCHQPAEFEFPRQELPLSFHFTGPYSHKSKREPVPFPYEKLTGEPLIYVSMGTIQNGLLWIFQMIAEACAPLKVQVVIALGGGHSPDSLANLPGNPLVVGYAPQLELLKKATLVITHAGMNTTLESLTNGVPMIAIPITNDQPAVAARIAWTGTGKVLPLSQVSVQKLQQFIKQVLTEDSYKNNAIRLQQAIKDSGGVRQAADIIEQAIFTGKPVFSKNQYTYQ

SEQ ID NO: 8564 - protein, 511 aa, Actinokineospora sp.
MGGRLRDRGLRPGAHVRAHVLALPPGPPQAAPVRRRAHPGGPAPRHRRRDRRRGLRRLEGAAAGRRRGRLPDPDARRLPLRAARQPVLRVGHARPVLVAQPRVYHSHNHNERTHSVASHIAIVNFPAYGHLNPTLGLVEELVRRGHRVTCTVTDHLAPAVEAAGGEAVRYTSVFGDFYTSPFTEEALSGEGLRTLAEATSLVEQVGEFYEANRPDVVLHDFMAWGARFFAAPRGIPLVRLFPTYAGNETFNIQAKFPVAELTDPKMMEMIEQLTALLPEVGFPDTGPMDFFMKPEHKSIVFLPREFHYDSETFDDRFVFAGPCLGDRSKYQGTWTAADDKPVVLVSLGTAATGRPEFFRTAVAALGTGEHRVVLVTGDHIDAAELGELPDSVEVHHSVPQLDVLSKASLFVTHGGMNSVLESLYHGVPMVVVPQMNEQRANALRVAELGLGAHLAPEDVTTESLAAAVAAVSGDAELRARTAEFGRSVRAVDGPAVAADAVEAHIAEHAGV

SEQ ID NO: 8565 - protein, 427 aa, Leptolyngbya sp.
MRIAIIAMGSRGDVQPYIALGKGLKAVGHQVRLITHENFEELVTAYGLEFCPVKGNVQAFMEDPENRKLLESGNFLAINARTAKASQQAAVDWAEGGLAACQSMELLVAGVGGLFLSLALAEKLKIPLLQAYIFPFTPTNAFPAILFPQSIAKLGGVVNRLSHHLFRQIMWQGSRAGDELARQQVLDLPIAPFWGSYDSAQFQRYPILYGLSSSVIAKPSDWQHTHITGYWFLDEAPDWTPPPALLEFLQRGSPPVFIGFGSMVSRDPEETAELVLQAIQLTGQRALLQSGWNGLRKSDLPDTVFMVDSIPHSWLFPRVAAVVHHGGAGTTAVGLRAGIPIVVIPFFGDQPFWGQRVAELGVGTAPIPRKKLTAERLAEAIHQAVSDRAMRQRATELGAKIQAEDGVANAVAIVQELEKCGAFCNEN

SEQ ID NO: 8566 - protein, 429 aa, Chthoniobacter flavus
MSHLGLICPELSGHLNPMTTLGRELQRRGHRVTVVGRLDARRKAESAGLNFAPIGEEDFPEGSMQTTSRELGRLSGLKAVQFTAELLRRSVVSILRDAPPVVDREKIDALLVDQVSPAGGTVADLTGRPWVMVSNALALNPDPHLPPCVLPWDYQTGILGRWRNAFGDTVLKWLARPIIAEINRHRRAHRLAPLAGTFSPGSCRLQIAQQPAFFDFPRRRPAAELHYTGPWHHAASHEEIPFPWEKLDGRPLIYASMGTLQNRRQFIFETIAAACAGLDAQLVISLGSRDQDAEAAAKNFAGQPIVVSIAPQLALLQKATLTITHAGLNTALESLSCGVPMVAIPITNDQPGVASRLAWLGAAEVVQPAKLTVPRLRAAVERVLREPGYRKVAERCRAEIQQADGLQRAADLIEGVFVETERSEYKIRM

SEQ ID NO: 8567 - protein, 449 aa, Unknown
  Description of Unknown: Candidatus Solibacter usitatus Ellin6076 sequence
MARLLFTVWPFAGHVHPALAIGHALRLRGHEVAFYTGEAVRSLLEAEGFRCFPFARVDEKRVFALASSEFPYRSSIWQQLRYAKQLQANFREWLLDTVPQQVEDLDTILTHWRPDVLICDLAFWSPILVLGETRGIPVAVLSVLAACLLPGPDAPAWGQGAPRPRNRIMRLRSTMKRKLLQWLSAGFLAQANGIRRRYGLPALRCSVTEFAGRMPLYLVPSMREYDYDRRDLPPSVHYVGPCLWDKPSAAPPPDWLLRLPAGRPLIYATEATIGTGEPFLLQAAARAFRNLPVDVVMTTGAQRNPAGLKLADSAPNVRVESYVPQSDLLPRTAVMVTLGGSGGVLAALKAGVPLVVVPTEWDRPENAQRVVEAGAGIRIPPNRCTPERLRSAVERILREPSYRANAQRLAAVSAHYSGPDRASELLEGLCTTAAAMPGSYGGNYRCHGF

SEQ ID NO: 8568 - protein, 299 aa, Bacillus stratosphericus
TLSQQHSFDLVYFDMFGAGELVRDYLQIPGIGSNPSFVLQEAHFDTPLYRKDEKAAHLLEEIHERFGVQPKHLMQFMKNRGELNMVYTSEYFQPSVDALDDSFVFIGPSFLKRADQHDFPLEALEREKVVFISMGTVLGDTEAFFNMCIDAFADFDGKVILATGEKIDMSLLKEAPSHFLIEPYVPQLEVLELTDVFVTHGGMNSVNEGIHYHVPMVVIPVDKDQPMVAKRLTDLSAARALDKDELTAKQLRDTVESVLGSDTYRAGIEKIEESFQTAGGTEKALRVIDQFMQAKQTQS

SEQ ID NO: 8569 - protein, 392 aa, Streptomyces glebosus
MAKHLLFVALFGHGHVNPTLPLVEELVRRGHRVDYATSAEHSEAVTKAGARWVELKLQSPEILTPPRQFGLEEIRVFLRGMFAEMCTQYPVLRDYCAAESPDAICYDGMNWPARVVAEDLGLPAVRLIPNFASNEAFSLFDDVMNDNGDENPVLALLAADCAEFSAEHGVTLAPESVLDGTEERNLVFIPREFQPAGDTFDERFHFVGPSLGSREHAEPWSPADPEAPVLFISLGTVFNDRPEFYRTCIDAFRDGPYQVAMAIGDLDRAALGEIPPTFDVRPYFPQPAVLRHADAFVSHAGMNSTMEALYYGVGLVTIPQMPEQAANAGRAQELGLGVQLDPATVTAESLRTAVTHVASDPAVRSNLDRMRTVVKGSGGAVRGADVIEEYLH

SEQ ID NO: 8570 - protein, 357 aa, Unknown
  Description of Unknown: Pseudonocardiaceae bacterium YIM PH 21723 sequence
MHIGFVCGPGIGHLTPVLAVARELVARGHRVTVPSTVEHRELIGAAGVAAPIYRSPLKESFRPEVRYSTQELLTAFRREAEQLLPRFEEIFAGDRPDLLVYDQATMVGWLLADRWGVPHVRTHPSVASNGHFTLWGRSFTAEILEFTEHQPDLGLVFCTRSFQPFGETFDERYRFVGPCIGERPATGWRPERTDRPLLYVSFGSLFNDRPEFYRLVVEAFRDQPWQVVMAVGKADVGVTAPNVELHEFAPQLEILRHASVFITHAGMGGVQEGLSAGVPLLGVPQIEEQELNADRIAELGLGRRLRPEDLTVHGLRDAVTGVLADVEMRDRLNDMRADIESAGGTRRAADILEAAVG

SEQ ID NO: 8571 - protein, 397 aa, Bacillus swezeyi
MEQKHIAILNIPAHGHINPTLALTANLVNRGYRVTYPVTDEFVKAIEETGAEPLRYHSTLNMDPRQIRELMKNKKDMSQAPMMFMKEVQEVMPQFEEMYENDKPDLIIFDFMAMTGKMLAEKLGIKAVRLCSTYAQNDHFQFSDFSKEDFQIELTSEQEAALKNANLPSFSFEDAFKPAKLNIVFMPRAFQPYGDTFDERFSFVGPSLAKRKFQEKDTELLNDNGRPVMLISLGTAFNAWPEFYQMCIEAFRGTKWQVVMAVGTTIDPDRFEDIPENFSIHQHVPQLEILEKAQLFITHGGMNSTMEGLNAGVPLVAVPQMPEQEITARRVEELGLGTHLEPEETTVASLREAVCQVDGDLEVIKRVKDMQKNIKDAGGAERAADEIEAFLALAAVK

SEQ ID NO: 8572 - protein, 341 aa, Pseudomonas sp.
IRDLCDTTRMLCAELPSALAVRQIEALLCDQMEAAGGMVAEGLGLPYVSVACALPVNREPQLPLPVMPFAYATDERSQHVFEGSRKVYDWLMSPLSKVLRDASRRLAIEPRDGLHECLSPYAQISQTLPGFDFPRQQPPANFHAVGPLRAPQTEQPGEWPIDPARPFIFASLGTLQGSRFDMFQRIATASRQLNAQLLVAHCGGLDARQEQRLIQAGATWVTDFAPQQWALRHADAVVTHGGLNTVMDAIVARTPMLVMPIAFDQPGVASRVTHAGIGLQLRRGAGAVQIRERLTQLRGLSVEPFERLATELANAGGTSRAADIVEAVVRTGEPVLAGLMP

SEQ ID NO: 8573 - protein, 391 aa, Paenibacillus sp.
MSKIVFFSIPAHGHTNPTIPVVREIVNRGHEVWYYSFLEFQEKIQASGASFIACDEYLPKLSPEELDRKAGKDFAALIEMVADTTIALDAKVCKELQELQPDCIVSDSLCFWGKLFASKLKIPYICSTTTFAFNQHTAKLMKRSFRELLKMAFGMPRINKKIQMLRNHGYDVRSFISIVQNDNDTDTIVYTSKEFQPMADTFSERYAFVGPSIRTLSPQENNKKDRQLIYISLGTVLNKNREFYDNCINAFAQSNYTIVISVGEKTDIKSLGIIPENFMVRNTVDQISVLQTADAFITHSGMNSVSESLYFGVPMVLFPQHSEQKMVANRVAELGAGVLLKGKKRADLAASVTEVLTNVKYEENAKKLSKSLRNAGGAVEAANVILKQTQE

SEQ ID NO: 8574 - protein, 392 aa, Unknown
  Description of Unknown: Clostridiales bacterium Marseille- P2846 sequence
MSKIAFFCIPAHGHTNPTLEVVRELTRRGHDVLYFSYQAFREKIEAAGATFIACDPYDVEMNLRPEDAARVGKDMGFSIKLLVQTTLALDGMVCETLKKWRPDCVIADSMAAWGKFAALKLGIPFISSTTTFAFNRYSARIMKPSLSQVFSMIAAMPSVRRDLKLLQSHGYPVKNLLSLIQNDDETDTLVYTSKAFQPRSDTFSEHYAFVGPSLHVPQPFKRDSRKTIYISMGTVNNRMPDFYQNCVEAFSDGTYRALLSVGDGTDIAALGPLPESVSVYGHVEQTAVLQSADAFLSHCGMNSVSESLYFGVPLVLFPQTAEQSGVANRTADLGAGLFLKENRPEAIRRAVDTLLGDAAYTQSARRIADSFKRAGGANAAADFVESRLRKRA

SEQ ID NO: 8575 - protein, 392 aa, Unknown
  Description of Unknown: Ruminococcaceae bacterium AF10-16 sequence
MSKIVFFCIPAYGHTNPTLGVVRELTARGHEVRYYSYEPMRTLIEAAGAQFVACDPYDCEQHLTPADGARVGKDIAFSTHILVETTLALDEMVCADMRAYAPDCIVADSMAVWGKAVAKKLGIPFISSTTTFAFNRYSAKVMKQSGGQMLKMMLAMPKINRDLQRLRDRGYPIKNILDIIQNDDWTDTIVYTSPEFQPCANTFSDKYAFVGPSIRPATETVEKAHDVLIYISMGTVNNDLLPFYRACIAAFADSPYQVILSTGEQIDRSALGTLPDNITALPHVDQIAVLQKADVFLSHCGMNSASESLYFGVPLVLFPQTNEQGGVAARVAELGAGLKLEKADAASIRTAVDAVLQTPSYRANAQNIRESFLRCGGAKAAVDRILSVADRK

SEQ ID NO: 8576 - protein, 393 aa, Bacillus sp.
MSKIVFFSIPAHGHTNPTIPVVTELVNRGHQVWYYSFSEFQEKIESAGATYIACDKFLPQLSQKELARKAGKDFAALIEMVADTTIALDEKVCKELKAIHPDCIVFDSLCLWGKLFAQKLGIPYICSTTSFSFNQHTTKLMKPSFLELWRMVVGMPRINKKIHLLKNHSYEVENFVSIVQNDNETDTIVYTSKEFQPMAHTFSERYAFVGPSVRQSSPVQSAKKDKKVVYISLGTVLNQNYDFYQNCIKAFAKTNYDIVMSVGEKTEISSLGNIPENFTVKNSVDQISILQTADVFITHCGMNSVNESLYFGVPMVLFPQHSEQKLVADRVAELGAGLKLKRTKPNYLATAVAEVLTNWTYKGNAQKLSESFRNAGGAVEAANVILTKIGEKS

SEQ ID NO: 8577 - protein, 394 aa, Bacillus nakamurai
MKKNHIAIINVAAHGHVNPTLPVAEELVKRGHRVTYATTEDFAQAVLKTGATPVLYRTSIKPDPKTIKEQVNKSDAFVMFLKEAADVLPQLEELYKDDLPDAVLFDFLALSGRLFADKWGIPAVKFCPSYGINEHFQIKKDKDIIEAAKQAIEEFQEEAENEQVKHMTMEEFFKPEKLNIVFMPRAFQPKQETFDDSFCFVGPSLGERTNTGSLELEEADDRPLMLISLGTAFNAWPEFYQMCIDAFRDSDWRVVMSVGTSIDPEGFTDVPDHFIIRQHVPQLDVLEKAKLFVSHGGMNSTMEAMNAGVPLVVVPQMQEQEITATRVDELGLGVHLPPKEVSVSRLQKDVQKVYQDKNILSRVKNMQQKIEETGGAKQAAAAIEDFIKEAVVEN

SEQ ID NO: 8578 - protein, 407 aa, Ktedonobacter racemifer
MATVVFLSLPAQGHINPTLPLVTELVRHGEQVIYYTSDEFQAAIELAGATYRSYGKAFPLDLVHNQYKFEHHPLLAVETLLETSLWVLAHLQAEIQASCPDYLIYDACCLWGNFLAQLLHLPAIASLSTMAANQRILNEIHASIHENVTQTPSREYEYLQRCLILLAILCDHYHLKPPQDIFAIFHNYGDLTLVYTSRAFQLDADSFDEGRFKFVGPLIASRSQAPPFPFTNLSRQPLIYISLGTMYSDRAAFFHTCLEALAESPWQIVMATGHNLDPASLEPLPSNIIMERFVPQLEVLQHSALFITHGGMNSVSEALYYHVPMVVIPQSMDQPWNAARVAELGAGKVLTNAQVTPESLHHSVEEILANPSFTRAATSIGESLRQAGGVQRAITEILAFKRARNIP

SEQ ID NO: 8579 - protein, 427 aa, Calothrix sp.
MTHFGLICPSATGHLNPMTTLGYELQRRGHRVTLFGILDSQAKTLAAGLEFRAIGESAFPKGTMTQLFTELGKLSGLAAVKYTITCIQKTGAMFLDEAPAVIKEAGVQALLVDQVSPEGGTVAEFLDIPFISVCNAMMINRDFSVPPFNTSWSYSRAWWAKVRYRAGYELLNRIGQPIRETINQYRREWKLPPYSDPNDYYSQLAQISQQPAEFEFPRQNLPKSFHFTGPYHNPASRESIPFPFEKLTGKPLIYASMGTVQNRLLPVFQSIAEACYGLDAQLVISLGGSASPEVLQELPGNPLVVSYAPQLELLQKATLTITHAGLNTTLESLSNGIPMVAIPITNDQPGVAARLTWIGAGKMVSLSRLSVPRLRDAIQKVLTEDSYKKNALRLQEAIQATNGVSRAADIVEQVVSTGKPVLAQTKQ

SEQ ID NO: 8580 - protein, 436 aa, Tetranychus urticae
MDDANKPLKILMTSMIDFGHLNSCLGIGYLLVKRGHQVYLAHFPKNKSIIEKQGIKFISLYDYADEGAQLSDAVPRSSSNFKPRFERSLKMDPLEALKEQIATGSINTGFVNILERYKAENVVMHKIVDQLKPDICLCDYLYPLPWMFTVDCPVIPVKSTNPVGLYRGPPSNSGYSVKDSTELWDEFKALNEKVNQPILDKVNEIFQLFNVQFIHRDHVKYFGIYIYPGPLDYHELAPPKEKWVRLDSALREHDATEFELPEKLKDKPGKLIYISMGTLISAVTELLTMILTPLANSPHRFIVSTGPNGDSIKLHDNMWGDKFVDQVALLPKVDLFITHGGSNSLIEGLTAGKPLIVIPQFGDQPDNAQRVADLGLGVRLNLHEFSGEKLLKAIEDVLNNKEIHLNVARVSEELKKSGSKEKVVTLIEKLARNKRL

SEQ ID NO: 8581 - protein, 423 aa, Gloeobacter violaceus
MIKRIVLVTYGSLGDLHPFLAVALGLQGRGHDVVLATSQNYRARVEEEGIAFQPVPPDLGLLEDDPQAIRRSMDLRTGTEFVVRSLFLPYLEQSYESLLAVCDGTDLIVGHPLAFAVPIVAQKLGIRWLSVGLQPMGFLSCYDPPVLPIAPWLAQLRFLGPLPYAVLFRLLEGVADGWLAPIENLRRRAGLPKSERHPLMHPFSPHGTLAWFSRVLAEPQPDWPPRTQVTGFPFYDRAEPGQSGLDAGLAQFLDAGEPPVVFTLGSAAVWVAGNFYQESAAAAEALQLRAVLLVGRNPKIDFPDLASSRIHVGEYAPYSELFGRSLAVVHQGGIGTTAQVLRAGRPMVVVPFSHDQPDNAERARRLGVARVIARRSYEGKRVARTLGELVQDQSAFKKATAVASRIQSEDGVAGACNAIEALL

SEQ ID NO: 8582 - protein, 416 aa, Frankia sp.
MARYLVYCTTAPGHLFPLVPGLRALRDRGHEVHLRIGAKLVDGPWSQGLHVAPTDPRIDEIDVREPTTGSGAARLRKAIAGLMSRGPLERADLDRAIDETDPDVILVDTNAYGAAVAARASGRPWGIALPTLIALPGKGIPPYGMGLAPASGPLGRLRDRVLWPLLIRQFGAAMLPPLNELRAGAGLAPLTSPLDYLLEADQVLVLTGEPLEYPRSDVPAHIRFVGAQIYDPPGETPAWLEEPGDPWVLVTTSTEYQGDERLALAAAEALRDEPVRVLITLADAFEHVDLPAAPNIRVERFVSHGPVLERAAAVVCHSGMGIVQKAVAAGVPVVAVPFGRDQPEVARRVVEAGAGVLLPARRLTADRLRAAVATARGQRAGALQASRRLLRQAGGEVFAVAAEELLAGTAVPSQAV

SEQ ID NO: 8583 - protein, 417 aa, Paenibacillus curdlanolyticus
MTRGIYFGVDLHGHVNPTLGLIRELTSRGEEILYYSGEPFRERIEAAGAAFTTYKEPLGFGTHDAGGIETFLVTADFILSRSQKIVSSLLEEVQAWAPDYIVHDAFCYWGKELALQLGVPGISVFANFAYIDEMADVDPEFFMEYVLRAGNDPVYAKNKGKTDVYRKLEAKLSKIIAMKYGVHTTSIINDIFCGKEKLNLAPTSREFQLYGQAFDDSYVFTGYAIEPRTEPDDFPFEWLDGRPLIYIALGTIFNDAEHIYTKCIEAFGDQEVQVAMSIGHQVPVERLGQLPDNVIVRPHMPQLALLSRAAAFVTHGGSNSIHESLCSEVPMVVVPQSFDQFMGAIAVEKAGTGIFLQGEDWQPAEVADAVRRVRTEPAYQEACGRIHRSLDEAGGPARAVDAIFAHVAAERGKALQP

SEQ ID NO: 8584 - protein, 520 aa, Drosophila erecta
MWPNLLLMCLLPGYLEGARILAVFPLPSPSHYFFALPYLKSLASLGHEITSVSPYPQREPSQNIHDIPVLEVLENFNEILRIASTPRGTWQKSDFINEYVLNLTKTVLNNEGVRCNILGPEKPHFDLVVMDLWRIDVLSGLAAYFDAPIIGLASYGTDWKIDELMGNISPISYLQSPSPRFYDLGAYGQRLSQFVERTLSYINYKWRHVRKEEALYRQYFPSTAKWKSLSEISRNFALVLVNHHFTLGPPRPYVPNMIEVGGLHVNPDPEALPAELDHFIQGAGESGVIYFSLGTNVRSKSLSEDRRKVLLETFASLPQRILWKFEDEQLPGKPSNVFISKWFSQQAILAHPNVKLFITHGGLLSTIESIHHGKPMLGLPCLFDQFRNMGHVKQMGLGLVLNIKEMTSEDFNSTIIRLLTNKSFEETARITAARYRDQPMKPLEKAIWWTEYVLRHKGAAHMQVAGKDLDFVRYHSLDVLGTFLIGALGFLGTFTFFIVMTLRKCPLLKKYKYEAIKKIQ

SEQ ID NO: 8585 - protein, 423 aa, Cronobacter condimenti
MSHYAVITPPLYSHVHAMQALAQALIARGHRITFIQQAEARTLLDDPRIGFYPVGEASHPPGSLARTLRLTAHPGGPAILSLIHDLALTTDMLCRELPDALSRLGVDGLIVDQMEAAGGLVAEALGLPFVSVACALPVNREPGLPLPVMPFRYAPTPRARKIYQTSQQIHDWLMGRHGAVIAHHAQRFGLPPRHGLHDCLSPLAQISQTLSMLDFPRSAPPACFHAVGPLRPPHPAPEPALPSSRPRIFASLGTLQGHRYGLFRTIAKACREADAELLIAHCGGLNATQVAKLETCGSTRVTGFTDQPLALSQSQAVITHGGLNTVMDAVASATPLLVVPLAFDQPGVAARVEHCGIGRRVSRFAGRRAFTQKLQALLSDESCRSRLIAMQRALTQAGGVQRAAHITEQALSARRPVLAQAAS

SEQ ID NO: 8586 - protein, 396 aa, Bacillus sp.
MGQKHIAIFNIPAHGHINPTLALTASLVKRGYRVTYPVTDEFVKAVEETGAEPLNYRSTLNIDPQQIRELMKNKKDMTQAPMMFMKEMEEVLPQLEALYENDKPDLILFDFMAMAGKMLAEKFGIEAVRLCSTYAQNEHFSFKSMSEEFKIELTPEQEAALKNANLPSFNFEEMFEPAKLNIVFMPRAFQPYGETFDERFSFVGPSLAKRKFQEKDTPVISDSGRPVMLISLGTAFNAWPEFYHMCIEAFRDTKWQVIMAVGTTIDPESFDDIPDNFSIHQRVPQLEILKKAELFITHGGMNSTMEGLNAGVPLVAVPQMPEQEITARRVEELGLGKHLQPEDTTVASLREAVSQTDGNLDVLKRVKDMQEHIKQAGGAEKAADEIESFLAPAGVK

SEQ ID NO: 8587 - protein, 426 aa, Cyanothece sp.
MSHIGLLCPTASGHLNPMTTLGYELKRRGHRVTLVGTLDSQAKVLAAGLEFRAIGEEDFPAGSTAASLSRLGQLSGLAAFRYTADLFKKATAMFLQEAPAALQTAGVELLLIDQTIFGGSTVAQHLDLPFISVCCALMLNRDADVPPLNTSWSYQPNWWGRLRNQAGYGLITRLTRPIAAILTAYRHQWNLPPLNHPNEAYSQLAQLCQQPAEFEYPRPALPPCFHFTGPYSNPASREPAAFPFEQLTGQPLIYASLGTVQNRLLGTFETIAAACQDFKVQLVIALGGGCEPESLPDLPGSPLVVGYAPQLELLPKARLTITHAGMNTTLEALSNGVPLVAIPIANDQPGVAARIKWTGTGEFVPLQRLTVAKLRWAIEQVLSEPSYQQNALRLREAIQRAGGVKKAADIVEQVIATGKPVIRQSQ

SEQ ID NO: 8588 - protein, 403 aa, Paenibacillus sp.
MKKTHIAMINIPAFGHVNPTLAVVSELVQRGYKVTYPATEKFILVVKETGASVLPYHSATTDLLDQLNHVKEINEVMSIHSENLPMRFLEEAISTYYQLEQMYADDLPDLILFDFMALAGKLFAAKHGIEAVRLYSSYANNEHVSTLHDVSDEIKNELASKLNAFSEKEGITGVSFMELFTPEKLNITFMPRAFQLKGELFDERFLFVGPSIGKRSYDESLPIDGNNDRPVMLISLGTIFNPWPEFYKMCIEAFRDSNWQVVMSTGSKISPESLGEIPDNFIVRHQVPQLEILPHTRLFITHGGMNSTMEALSCGVPLVVIPQMFEQEITARRVSELGLGHHFLPDEVTVQALQTSVQEVSEDEQLKRRVYDMQKNIQEAGGAKKAADAIEKLLSVSNMKARV

SEQ ID NO: 8589 - protein, 397 aa, Evtepia gabavorous
MSKLVFFNIPAYGHTNPTLGVVRELVARGNQVWYYSFAPFQKVIQEAGATFVPCDDAALGMTPSPEDSARVGKDLAFSIDLIVRATLALDEKICRDMERIAPDGIVADSMAFWGKLAAQKLGIPFLSSTTTFAFNRASAKVMGQGMGNLFSMVRAVPKIHRSLRRLRAYGYPVKNVFSILENDNATHTIVYTSRYFQPAAETFSPRYVFVGPSLRPIRQPLAPSPQKTVYISLGTVNNQNLPFYRSCLTALGETPYRVVMAVGRESMRHALGPLPANVQAEAMVDQIGVLAAADVFLTHCGMNSVSEALFFDVPLVCCPQTQEQRGVANRVLALGAGLLLPDDSPQAIAQAIGIALSDPSYRAHAATIAQSFRESGGAPQAAETILQVIAQDRATGT

SEQ ID NO: 8590 - protein, 400 aa, Unknown
  Description of Unknown: Actinobacteria bacterium OK006 sequence
MTTRPAHIAMFSIAAHGHVNPSIEVIRELVARGHRVTYAIPPAFAEKAAETGAEPRLWHSTLPTDDDPEAWGTELIDNIEPFLTDALQAEPQLAAAYEGDEPDLVLYDITAYPARVLAHRWGVPIVQLSPNLVAWEGYDEEVGKPLFEPLKQTPRGKAFYDTFARWIAENGMDLSVEDFMGRPDRCLVLIPKALQPNADRVDEKRYTFVGACQGERAAQGDWRRPADAEKVLLVSLGSSFTKQPAFYRACVEAFGGLPGWHVVLQIGRFVDPAELGEMPGNVEVHPWVPQLAILRQADAFITHAGAGGSQEGLATGTPMVAVPQAVDQFGNADMLQALGVARHLPMTEATAETLRETVLALVEDPEVARRLAVIREEMAGEGGTGRAADLIEAELRLRQA

SEQ ID NO: 8591 - protein, 394 aa, Bhargavaea ginsengi
MSRIVFFSLPAHGHTNPTLPVVRELTERGHEVWYYSFREFREKIIAAGAKFIGCDQFLPQATDKEISKKAGKDFAALIEMTVDTTLAMQEKVLKELSSAKPDCIVSDSMSVWGKLYAQKLDIPYICSTTTFAFNQHTAKLMKPGFKETLKMIIGMGRIRGKIKELQQAGYEVNSFTSLIGNDNDTETIVFTTREFQPLAETFSDRFAFVGPSIAGKDQNTVEKEKSGTLVYVSLGTVLTNSHFHKNCISALTGSKGEVVMSVGEKTDIGQFGTAPDNIRIKNTVDQIAVLGRADVFITHSGMNSVSESLYQGVPMVLYPTHSEQKLAAQRVAELGAGIILKNDRPQTIREAVHQILEDPQFRRNAAKISGLFRNAGGASAAADVILSRINREEP

SEQ ID NO: 8592 - protein, 252 aa, Bacillus amyloliquefaciens
MPFKPDRECEELLAEMKDKYGVAPDSLVQFMNNTGELNVVYTSRYFQPESETFGDEYLFIGPSFPKRKGDTAFPIDSLKNEKVIYISMGTVLGNTEAFFNLCIDAFSDFEGKVVIAAGEKADLSKIKQAPENFIIAPYVPQLEVLEQADVFVTHGGMNSVNEGIHYQVPLVVIPHDKDQPMVAGRLTELNAGFTVQKDEVSAEKLKLAAEEVLHNGKYKQGIQAINESFKECMDMKDVLARIDRFIETKNAH

SEQ ID NO: 8593 - protein, 397 aa, Streptomyces pratensis
MTTPPRAHIAMFSIAAHGHVNPSLEVIRELVGRGHRVSYAVPASFADTVAATGAEPVVYTSTLPTRQEDWGSELIDHIEPFLDDAVQALPQLADAFAGDEPDLVLHDITAYPARVLAHRWGVPAVQLWPNMVPWEGYAEEVGEPRNAEVRRTERGRAYFERFADWLAVNGLGDLSSGDFVARPRRGLVLIPEALQPNADRVDHARFTFVGACQGERADQGEWKRPADAEKVLLVSLGSSFTGGPAFYRECVEAFGGLPGWHVVLQIGAQVDPADLGHVPPNIEVHPWVPQLSVLKQADAFITHAGAGGSQEGLATGTPMVAVPQAVDQFGNADMLQSLGVARHLPKEEADAASLRAAVLALADDPDVAARLTLIRGRMAEEGGTGRAADLIEAELPA

SEQ ID NO: 8594 - protein, 392 aa, Bacillus cabrialesii
MKKHHISMINIPAYGHVNPTLALVEKLCEKGHRVTYATTEEFAPAVQKAGGEALIYHTSLNIDPKQIRERIEKNETTLNLLKESLSILPQLEELYQDDQPDMVIYDFIALAGKLFADKLNVPVVKLCSSYAQNESFQFGSEEMLKKIREAEAEFKAYLEQEQLPAVSFEQLAVPEALNIVFMPKSFQIQNETFDDRFCFVGPSLGKRTAQESLSIEKDDRPVMLISLGTAFNAWPEFYKMCIDAFRESSWQVIMSVGKTIDPESLGDIPDHFTIRQSVPQLEVLEKADLFISHGGMNSTMEAMNAGVPLVVIPQMYEQELTAKRVDDLGLGVYLPTEEVTVSRLQEAVQAVSGDREVLSRVKNMQKDVKEAGGAERAAAAIEAFMKKSAVPQ

SEQ ID NO: 8595 - protein, 390 aa, Unknown
  Description of Unknown: Lachnospiraceae bacterium TF09-5 sequence
MSRIAFFNIPAYGHTNPTLEVVRELVKRGYEVHYYSFREFRDRIEDTGAACICCDEYMPPAPADIDKKVGRDLASLISMTVHVTLAMEERILKEFGEWKPDCIVSDSICIWGKLYAKRLGIPYVCSTTTFAFNRYTAKLMKQKPGEIFRMMAGMSEINARMEELQQHGYQADKFYELLQNDNDTDTIVYTSPEFQPMADTFSSRYRFTGPSLAVPVSAAAERRRPLVYVSLGTVLNKKDSFYRNCMEALKGENMDVIMVVGSRTDIPSLGDIPSNFTISPRVDQLQVLQEASVFITHCGMNSVSESLYFGVPLVLFPQQPEEGAVARRVQELGAGIFLKSTRPAVLKRTVTYLLENQSCRENAGKIGAGLKRAGGALKAADTIEEIIEKK

SEQ ID NO: 8596 - protein, 393 aa, Bacillus atrophaeus
MKQHHITIINIPAYGHVNPTLALVEKLCEKGHRVTYATTEEFAPAVQQAGARPLLYETTISVDPQQIKELMEKNETPLMFLKESLGILPQLEELYKEDQPDLIVYDFIALAGKLLADKLQVPAVRLCSSYAQNESFQMGTEEMLKQVKEAEAEFQAFLEQENLPAVSFEQLAIPEAFNIVFMPRSFQIKNETFDDRFCFIGPSLGKRSEQERLLLKEKGDRPLMLISLGTAFNAWPEFYQMCMEAFGGAKWHVIMSVGKSIEPDSLGDIPDNFTVRQSVPQLDVLAEADVFISHGGMNSTMEAMNEGVPLVVIPQMHEQELTAQRVEELGLGIYLPKEEVSVPRLQQAIGNIFSDKEIHSRVKDMQKDVKEAGGAEQGAAEIEAFMKKSVVPQ

SEQ ID NO: 8597 - protein, 389 aa, Eisenbergiella massiliensis
MSKIVFFCIPAYGHTNPTIEVVRELVKRGNQVHYYSFYEFRSRIEETGAVCIPCDDFMPPAPKDIDKKVGKDLSSLVDMTVDVTLAMEDKVLGELRAWKPDCIVSDSICIWGKLYAKKLNVPFVCSTTTFAFNQQTARLMKQSLSELLRMLSGMPRINARLRQLRRHGYEIRQFYELLQNDNDTETIVYTSKEFQPMSETFSDKFTFTGPSIAVPKPSGHKKSRPLVYISLGTVLNRQEDFYISCMKALKTEAVDVIMSVGGRTDISGLGVIPDNFQVIPRVNQLEVLQEADVFLTHCGMNSVSESLYFGVPMVLFPQQPEEGAVARRVQEVGAGIPLPGREASVIRESILQVLKNARFRVAAGGIGESFRKAGGAQKAADVIEKISSK

SEQ ID NO: 8598 - protein, 393 aa, Streptomyces sp.
MAHIAFFNFPAVGHVNPTLGVVEELVKRGHRVTCTATEFFVPGIKAVGATPIVYESPFGEFYRSPYNEEMMAGEGVRCLDEAIALHKQVSGYYGEDRPDVVVHDFMAWGARFYAAEHGLPTVRLFPSYGVSETFNIAEKFPWSAPDDPKILEMVQRLTALLPTFGLPGDMGAFVTDVAKTGIIFLPREFHYEGETFDERFVFAGPSIKDRSTFQGSWEPKSADRPVLLISLGTAATGWSEFFSLALRAFGDSDWDVVMAVGDHIDPAELGEVPANFEIRRHVPQLDVLRHARVFLTHAGMNSTMESLYHGVPMVAVPQMNEQRANALRIEELGLGRHLPREEVTVESLRASVDAVAADEAVAERVRTMQEALRSVDGAAVAADAVEARLAATD

SEQ ID NO: 8599 - protein, 406 aa, Paenibacillus sophorae
MKKTHIAMINIPAYGHINPTLAVVAELVKRGYKVTYPATENFIPVVKETEVSVLPYHSDSMDLFEQLNHVKQISEAISTHSENLPMRFLEEAISTYYQLEQMYADDLPDLILFDFMALAGKLFAAKHGIDAVRLYSSYANNEHISLLPDVTDEVKNELASKLKAFSEKEGIQGVSFMELFTPEKLNIAFMPRAFQLKGDLFDEHFLFVGPSIGKRSYDESLPIEENNDRPVMLISLGTIFNPWPEFYKMCIEAFRDSGWQVVMSTGSKISPESLGDIPDNFIVRQQIPQLEILPHARLFITHGGMNSTMEALSYGVPLVVIPQMFEQEVTARRVTELGLGQHFLPDEVTVEILQKSVQEVSEDKQLKQHVYDMQKNIQEAGGAKKAAEAIEKFLNESTRHNIHVAH

SEQ ID NO: 8600 - protein, 401 aa, Dictyobacter sp.
MAKYAFFSIPAHGHVLPTLPLVAELVSRGEHVNYYMTGEHKDSIEAAGARWHDFPFFGKLSLEDEERGTNILIESLRAEQTDFIIYDFFFIWGTLFARALQIPAINIRGTYANNRHFSMQSIHQHKSHIWRGKDKDDSAKYFMPPLYAQFARIGKFLNVPLPLSDDPFDVFAGNEALNIYMMSRKFQPYAQTFDERHVFVGSSIQSRASNGDFPFEALDGRPLLYIALGTLFNHRADIFKTCLKAFAQTSWQVVLSRGRQSTIFALGPVPANFLVVNYAPQLELLKRTAIFISHGGMNSTIESIMAGVPVIYIPQIEEQAINAENAEKFGLGIALNPENVTVDQLRDAVERITNSRAYYEENIQAMRSSIQSEGGYKRAVDAILSLNARGELAPMSSSSSS

SEQ ID NO: 8601 - protein, 393 aa, Pseudobacteroides cellulosolvens
MAKVLFVNGNVHGHINPTLPVVRELVNNGEEVCYFSTMEFKQKIEAAGARFVDYGSRMYEFFQRFKPSGDHPFYTLIEFMLEMDRTAVPIVIEKTKGEAYDYIIHDSMFGAGNVLSKLLNIPAICSCTSFAMNRIPLPSHMFQPGFNPQLDNIYTKLKDTVADWGVEKLDIMDIFFKKETLNIVYTSKMFQPEWETFDDSFRFVGPSIAEREDRLDFRLEDVGNKPVIYISMGTIINQCMDFYKKSIEAFKGENCMVIMSVGNKTDIGLLGEIPDNFVVRNHVPQLEVLKSADVIICHGGLNSVSEALYYGVPVISIPQVNDQYMVSRQLVKLGAGLELKMEDITYKVLKNSVKTVLSDTSYKASSSKIGRSFVEAGGYKAAAKHILDFIKQI

SEQ ID NO: 8602 - protein, 402 aa, Bacillus sp.
MANVLVINFPGEGHINPTLAIVSELIRRGETVVSYCIEDYRKKIEVTGAEFRVFENFLSQINIMERVNEGGSPLTMLSHMIEASERIVTQIVEETKGEKYDYLIYDNHFPVGRIIANVLKLPSVSSCTTFAFNQYITFNDEQESRQVDETNPLYQSCLAGMEKWNRQYGMKCINMYDIMNHPGDITIVYTSKEYQPRSDVFDESYKFVGPSIATRKEVDSFPMEDLKDKQLIFISMGTVFNEQPELYEKCFEAFKDVEATVVLVVGKKINISQFENIPNNFKLYNYVPQLEVLQYADVFVTHGGMNSSSEALYYGVPLVVIPVTGDQPLVAKRVSEVGAGIRLNRKELTSELLRETVKKVMYDVTFKENSRKVGESLRNAGGYNRAVDEIFKMKVNSYLKLK

SEQ ID NO: 8603 - protein, 310 aa, Bacillus cereus
LYILEITKRLCKSINFDFVVYDIFGAGELVKEYLQVPGIVSSPIFLIPPVLLETLPFHPNAEIQFQPDELSEKLLYQMEHEFGVKPKNNLQFMHNKGDISLVYTSRYFQPNSDSFGENNIFIGPSIIKRKTNVKFPLELLSKKKVIYISMGTLLEGLEPFFNTCIDAFSNFEGIVVMAIGDRNDISKIKQSPDNFIITPYVPQSEILSEADVFITHGGMNSVHDAIHYNVPFVIIPHDKDQPMIAQRLTELEAAHRLLKEHVNVQTLKKAVTDVLSNEKYRHGIRKLNESFLECGGSKRAIAVIDALLNK

SEQ ID NO: 8604 - protein, 449 aa, Sphaerobacter thermophilus
MTGSSNRRTIIFFPEGAFGPTNNCIGIGKILLERGHRVVFVVEESFAGTLAARGFEERLMRLSPPPEVPEEPGQFWKDFIRDTAPHFRKNTFDQIASLTQPIWESLVDGAIYVEPRLREIFAEVQPDVIVEDNVVAFPAMLTAGVPWVRIISCNPLEIAEPDLPPALSGLPTDDRSEWERWRAEYDRCHADLYARFNAFVQENGCPPLPPGQFMYESPWLNLYLYPEEADYPRSRPLPATYHRLDSSVRDTEPPFSVPESLRGEGPLIYVSLGSLGSAEPELMNRLVDLFAGTNYRVIMSLGPQAGQIELPPNIWGEEFLPQPSILPLVDAVVTHGGNNTVTESVHFGKPMLVLPLFWDQHDNAQRVQEVGFGWRLTSYGFTDAEFHEALTDLLRDDARRARMQRIAARLQANPGTVKAADLIERVAVTGEPVLREDVAGTSAGAGDGA

SEQ ID NO: 8605 - protein, 397 aa, Salinispora arenicola
MAHLLFVNVASHGLVLPTLAVVTELVRRGHRVSYVTAGGFAVPVAAAGATVVPYASEIIDADAAEVFGANDLGVRPHLMYLRENMSVLRATAAALDDDVPDLVLYDDFPFIAGQLLAARWDRPAGRLSAAFASNEHYSFSQDMIGLAGTIDPLDLPAFRDNLAALLAEHGLTRSVVACWQHVEQFNLVFVPKAFQIAGECFDERFEFVGPCFGQRRYLGRWTPPTDDRPVVLVSLGTTFNDRPGFFRDCARAFADQPWHVVMTLGDQVDPAQLGELPPNVEAHPWVPHVEVLERARVCVTHGGMGTLMEALHWGRPLVVVPQSFDVQPMARRIDQLGLGVLLPGAKADGQELLAAVERVAGDPALAQRVAAMREQVRRAGGAYRAAGAIEAYLSRRR

SEQ ID NO: 8606 - protein, 394 aa, Negativibacillus massiliensis
MYKIAFFCIPAHGHTNPTLAVVRELTRRGCEVRYYSYLAFREKIEESGAVFISCDEYGKTTVNSDNQAQVAFDLACSIHILTDTALALDEMICRTLKEFQPDCIVADSMAVWGKFAAYKLGIPFVSSTTTFAFNRFSARIMKPSLHQMLSTLKSLPGVHRDLKRLKKQGYPVKNFLSILQNEEGTPTIVYTSKEFQPCSDTFSDKYAFVGPSVCLPSPISKTPGKKLVYISMGTVNNRLPHFYQNCLAAFSDEKYAVILSVGNEVDISSLGTIPPNCTVEHQVNQLAILQQADVFLSHCGMNSVSESLYCGVPLVLFPQTQEQSGVANRVLELGAGLLLKEGQPESIRKAVEAVLSDPHLYQKAAEISESFHRAGGAYAAAEHILQQIKQKTIS

SEQ ID NO: 8607 - protein, 390 aa, Lysinibacillus xyleni
MSKIVFFSIPAHGHTNPTIPVVSELVKRGHEVWYYSFNEFQTKIERSGATFISCDDFLPSITEKEIARKAGKDFASLIEMVIDTTIALEDKVCKELKELQPDCIVSDSLCLWGKLFAKKLSIPFVCSTTSFAFNQHTAKLMKRGIKEIINMLIGMPRIHKKIQLLKSHGYQVENFVSIIENDKDTNTIVYTTKEFQPMAQTFSEKFTFVGPSIENANKIITNKSKKVIYISLGTVINQNYHFYRHCIEAFTKSNYEVIMSVGDHTNIASLGRLPDHFTVKNSVNQIEVLQKADVFITHCGMNSVSESLYFGVPMIVYPFHSEQKLVAKQVEDYGAGVRLTALKASNLVNVVEMVFTNDKYKKNAVKLSESFRSAGGAKKAADVILQVAQQ

SEQ ID NO: 8608 - protein, 547 aa, Anopheles darlingi
MDCGRRRKTGTNRNPMMLRLAALIVGGLLVAMVPVGTVQGENILFLQTICSKSHHIWNRQIFDRLYENGHNLTILSFEQEASVPGKTFLVMDEFQQKLMAKFADTATATDFSSYEGAFGNIMNVYEYYEVSSALLVEEPAIKRLLDYPRSFRFDLIVHDFTMGQFLLGFVQRFGNPPLVAVSAYNIPSYTQFLADIPIYTTYLPHPASSFGSRMSFTERARNTVYWWFDMLYRQQIFMPRENQRMQLLFEGDSLTHVKLLERRTELVLVNSDPALDFYQLLPPNVVQVGGLHIKRPEEMTPMMKQFMARANRGVVLFSFGTNVQSEMLGPEINRQLLELFRSMPEYGFIWKHANADGLIMPPNVLMTPWVPQSAVLANSRTKLLVSHGGLLSLQEAAWNGVPVIGVPFFADQFSNVRRLELSGTGVGIPSSKLNGETLREALEKLLNDPSYRKRAKELSNLFRAQPEPPLDRAIFWIEKVIANKGLRYLRSPARSMAPYQVYGLDMLAVLLLIALGYYLIFKRHSKPASTSTTAGSQQGPAMKRKEE

SEQ ID NO: 8609 - protein, 422 aa, Microcystis aeruginosa
MTHFGILCPTASGHINPLLPLGKELQKRGHKVTCFLTLDGEEMVQAAGLDFQAIAPDKYPKGTSAKNLAEIGQLRGTAAVRRTVQSVTNSTAALFETIPQEMRRLGIDALIVDQVSPSGGTIAEKLAIPFVSFAGALVLNRDPLIPPFMTTWDYNPSFIGVIRNKIGYKLLDSLTRPLNELINRQRQEWGLIPYQNINQRYSPIAQISQQPAEFEFPRPNLPAHFHFTGPFHDSSTRKTIPFPYEKLTGQPLIYASLGTIQNRLQSAFNAIAEACADLPVQLVLSLGNTDSNIQITTKNALVVPYAPQLELLTRASLTITHAGLNTTLESLAQAVPMVAIPITNDQPGVSARIKWSGTGEVIPISRLEVPRLRKAIEKVLSVPSYRENALRMQKALQKTGGVKMAADIVEKAISTGQPVLSV

SEQ ID NO: 8610 - protein, 392 aa, Bacillus mojavensis
MKKHHISIINIPAYGHVNPTLALVEKLCEKGHRVTYATTEEFAASVQQAGAEALIYHTSLNIDPKQIREMIEKNETPISILKESLSILPQLEDLYQNDHPDLIIYDFIALAGKLFADKLHIPVIKLCSSYAQNESFQLGSEDMLLKMKEAEAEFKAYLEQEQLPAVSFEQLAVPEALNIVFMPKSFQIQHETFDDRFCFVGPSLGKRTEQESLEIEKGDGPLMLISLGTAFNAWPEFYKMCIEAFRNSSWQVIMSVGKTIDPESLDEIPANFTIRQSVPQLEVLAKADLFISHGGMNSTMEAMNAGVPLVVIPQMYEQELTAKRVDELGLGVYLPKEEVTVSRLQEAVQAVSGDQEVLSRVKNMQKDVKEAGGAERAAAEIEVFIKKSAVPQ

SEQ ID NO: 8611 - protein, 407 aa, Ktedonobacter racemifer
MKYILANVPGFGHVNPTLPVVEELVARGEEIIYYVPEGFKDAVEAVGATFRPYELDLSNMAPPAMGQGGQMPGFQIQNALPFRMIKESQRILPQVLEQLRQERPDAILYDPMCLWARIAAQVLHIPAIQLRPSYAVNEHVKLFPMEPGNGARGPVPPPFMQQIREDIATLCEQYEFPPFDLQGIFGHAEPLNIVFLPRAFQPAGETFDERFVFVGPSIRPRHEKSAFPLEALEGAPVLYISMGTVFNNQLEFFKGCIEAFGGTEQKVVLSYGKRIQPVELGPLPTNFIASAYTPQLEVLAHTDVFVTHGGMNSTMESLYYGVPMVVFPQMVEQQMTARRVSEMGLGVMLESSSDSAQKLREAVERVRQDVSFHVRAQEMQRAIQQTGGYREAADAIMGHTQKTLQRA

SEQ ID NO: 8612 - protein, 422 aa, Calothrix desertica
MTHFGLICPASTGHLNTMLPLGKELQQRGHRVTLIGKLDVESQTLATGLEFKAIEESESPLGSGAEALAKLGKLTGREALQYTVHLLANNAAGLLREAPKVIKAAGVEALLVDQVSREGGTVADFLGIPFITICSAVVLNRDESVPPHFTNWNYNPTWWGRLRNRVGYQALNRIVKPITKAIDEYRQEWKLPRYSNPNDSYSQLAQISQQPALLEFPREKLPQWFHFTGPYHSVIGREVPGFPYEKLTGQPLIYASMGTILNPLTLFQQIAEAYVGLDAQLIISLGGSAKPESLAKLAGSPLVVEYAPQLELLQKAAVGITHGGLNSTLECLSNGVPMVVIPSVNDQPGVAARVAWAGCGEALPIKSVTVSKLRTAIQKVLMENSYKQNALKLQSCIRHAGGVSRAVDIIEQAVATGKPVIS

SEQ ID NO: 8613 - protein, 1071 aa, Vanessa tameamea
MIVNFLTFKLIVIIALSSFNEVQTLNILGVFPLPAKSHFFVFAPYLKELANRGHNVTVISFYPQKDPIPNYHDINLSDNSQPPQISHPVTKSLFIIFLSLTLLQALGGPFTCRMLLEDENVQNLWATQTKFDLVVVEQFNSDCGLALAHILGAPVIGITSHTLMPWHYSRFGVPYNPSYVTFDFFEGGPHPTFLQRILRTIIYNHVNFVFYHVTHRLEQNIIGEFFNDVPPLKELAKDIKLVLVYQNFMLSGSTIMPSNIIEVGGYHVAKVKPLPDELRKFIEDSEHGVIYISFGTLLKASTIRPDTLQEIINALEELPQRVIWKWNKQSLPGNPKNIYLAKWLPQNDILAHPKVLAFYSHCGLLGTTEAIYHGVPIVGMPIYGDQPTNAAAIEESGLGVQLHYVLLTKDYLLEKFKTVLDPKFRERVKFLSKAWHDRPVKAMDTAIFWTEFAARHKNFTFRTPAADVPFYQYFCLDILAILFIFFAVTIAILKYSITILIKIVFASKDLSSNGVRKVKINYFLVEHTRKVSSNHKPETHGRTRLSVILIMYSNTLRIAILLIIPFNVISLNILSILPYHGKSHFFVFKVYLQELSRRGHNVTVISHFPQTDPPRNYHDISLAGTIEAIEDNLPFHRSFLSILEVGLYLTNSGKVNCEIMLANKDVQKLVKDRPKFDVIVVEQFNSDCALGIAYKLQAPVVGIMSHILMPWHYNRFGIPSNPSFVPFHFLEGGTKPTLMQKVQRTVLDVYFKTMFYVFSQRSNEQTLAKYFDDVPPLENLAREIKFLLIYHNFILTGSRLFPANVIEVGGYHVKETKPLTGELLKFMEEAEHGVVYISFGSVVKSSTMPEDKVKAVLEAIAELPQRFIWKWENQNMLLDKNKLYTSNWLPQVDILGHPKTLAFLSHAGMGGTTEAIHFGVPMVAMPVIGDQPANAAAIEESGLGVQLQISDLTKDNLVAAFKKVLDPTFRKNAKLLSKAWHDRLMSPLDTAIYWTEYAARYPNMTFRSAAADVPSYHYYNLDVMGVFAIALLSTTYIFKGIVYTICSKNRKTTNNNEHSSKNKNKRRSKRE

SEQ ID NO: 8614 - protein, 415 aa, Daphnia pulex
MVAETTYGDSRIQTLLAKGKFDLVMFSEACGLTCYPFGWHFKAPTIAMSPNVLFPGRAALLGDEEHYSYVPFILSSYTDKMSLNQRLGNYLISKLFNTFVHDWHIDSVHSIFKKMVDPDCPPFIEIEKNFSLVFTNSHPSFSYPRTLPPQVIEVGGLHCRPARPLPDDLEAFVSSSEAGFVVFAIGSAIKMEDMPEEMIQSFIKAFARLPQRVVWQWKGKVRSDLPANVLAVPWLPQQDLLGHKHCRAFLTHGGLNSLQEAVYHGVPVLGFPFGTDQTLNVGRAVKEGYAAKLEWKEITQETLIKSIQEILHDSKYKKSAKRISGMFRDQIQPPLERAVFWTEFVLRHKGTDHLRLGSIDLAPYQRALVDVYFVFSLFFIIPLLLVFFCVRKCCCANKRPAAPPAVRNEQIKKRQ

SEQ ID NO: 8615 - protein, 519 aa, Orussus abietinus
MDCTKLILFVVLWCANLSASFRILGICPSSSFSHQQPFQALMKALVMKGHEVTVISTIPMKLPAKNYRNVDVSFTYRKKDCTGLRHVNAFKILMDNMNEANNLCEEQLTSDAVQQLMSRNETFDAVIIEQLWFQCYYALVKHYNYPILIGYLSVGNLPYVMDSVGNPDDPTLNPDMAYPFTDRMTLEERIWNIIYTTWCRLYYRYVHLPRVQRILDKWFPGTSVYDVDRNFSLVILGNNHVLGYPKPLLPNVVEVHSLQIQENPDPLPIEIQDFLDSGKDGVVYFSLGSNLQGHQLPPLTLKALFDAFSALKYRILWKYNNDASFNITNIKFVKWAPQQAILAHPNVKAYIMQGGLQSLQEAVHYMVPVIAIPFFGDQNFNARKILDTQIGLNLNVDSMTKETIMHAVSEVIDNPKYSKNIKQLGDILKDEPVKPLNRALWHVEHVLKFPNARHLRYHGRDISWLEHHTVEVLFCFAIILLISALYKCSVMRERNVIRHKCKMQNRFEEIASHSKSKDN

SEQ ID NO: 8616 - protein, 532 aa, Caenorhabditis remanei
MRLFYFSFLLIFQCSNAFKYLIISPIYSYSHVKFMSNIADKLADHGHEVVVFQQQILDSLRDKKDIKNPSIQVINYEADENGKEFYRNRPKSTVRKYWTTNQAATPWAADQFAETMSNDLEHMCLQVFQDKALHEKLKSEKFDVVIAEPFDPCGLYLADYLQIPSKIVAMASSRIDPVQWAVGQPSGLNFIPGPGSTYGKESGLWERVNNVWMFFMRTQMFRTVYWNLLDTIREKTGTAIRDIDEIVADSAYLFFNSNPYLDFPFPSLTKCVPIGGFSMNVSSWKTEKLPESLDKLLDEKEKTVYISFGSVIRSADMPEDYKNGVIEMMKSMPNVTFIWKYEDEDDIEIRKNIPSNVHLMAWLPQPALLADSRLSLFVTHGGLGSVMEVAYSGIPAIVIPLFFDQPMNGEMLKRHGGAEVYSKFDLKDSQKLSGVVQKMLNSDYPRNAKRLSNLLQKQPIDPTDRLIKHAEFAAEFKSLPELDPYSRQLNFAQYFFLDITVLVIVCILIMLRLLKLTIHFVRFLMRVKSKYE

SEQ ID NO: 8617 - protein, 526 aa, Caenorhabditis elegans
MLLRILTFLAVCQVTTSHKILMFSPTASKSHMISQGRIADELANAGHEVVNFEPDFLNLTDKFVPCKKCRRWPVTGLNNYKFKKIQNGLSGDVFQQSSIWSKIFNTDSDPYQDEYTNMCEEMVTNKELIEKLKKEKFDAYFGEQIHLCGMGLAHLIGIKHRFWIASCTMSVSMRDSLGIPTPSSLIPFMSTLDATPAPFWQRAKNFVLQMAHIRDEYRDVVLTNDMFKKNFGSDFPCVEFLAKTSDLIFVSTDELLEIQAPTLSNVVHIGGLGLSSEGGGLDEKFVKIMEKGKGVILFSLGTIANTTNLPPTIMENLMKITQKFKDYEFIIKVDKFDRRSFDLAEGLSNVLVVDWVPQTAVLAHPRLKAFITHAGYNSLMESAYAGVPVILIPFMFDQPRNGRSVERKGWGILRDRFQLIKDPDAIEGAIKEILVNPTYQEKANRLKKLMRSKPQSASERLVKMTNWVLENDGVEELQYEGKHMDFFTFYNLDIIITAASIPVLIFIVLRISNISIITSSPKNKKD

SEQ ID NO: 8618 - protein, 588 aa, Trichoplusia ni
MQGFVLVILYFAISGDGYNILGIFPHSARSHHIYFTALVEELSRRQHNVTVINYHPMPNLPKVVRISLLGKENASVTVNTEKRLELLSISDISMAYTTAIKYKDIANRNCIKMIENKKIRKIIDLAVHFDLVIIEQFVSDCGFAIAYKLNAPTIGISAHILKPWSYSRLGAPNNPAFVPNHFFASGAKPNLFNKMKSLIVNYGMNLYYERVIQKSDQEIVNKVYPDVPPLENLGKNMSLVLINQYFPLTRPQLYSSNVIEVGGLHINNKDGLRDKGLKTFLDSAQNGVVYISFGSLASNLPRRLINSIIQLLRKSNMAFVWKTDITHWDAPKNVFIGKWMPQVALLCHPKVIGFISHSGMLSTTEAVHCGVPIVSVPLFGDQFANGRSVVESGVGVAVDVLTITEKVLEGALETILEEKLERLCNFATHLVGAQPTSTVDNLLRMCEATSEHYGWCKTLTQDDTSNIRKKKIEDSVIRLCSKNFRYQRNAKQLSGVWKDRPMSPMDTAIFWIEYVARNKGAVNMKPVTVDMTFYEYFCIDIFLLIVIVLVLVVVSLLLTAKITFFAVRRIKLFLKDRKSKYFKVMSVS

SEQ ID NO: 8619 - protein, 524 aa, Branchiostoma floridae
MMFFTPFISVTVTSLFLLSCQFAIGKKVLLVPVPFADSHWLAQANLGRALVNRGHTVTALVSEDSLAERQSAEFLFETFEDRGTRARLKALEGRLVSNAAEMSLVGVVQAAIMLSQEMMKHCDFLLGDSNLLQRLRESRYGAVVTDPFFPCGAILAAHLQIPHVAHLRTNAYRIDLAATGVPQPPAYVPDFLLPFTDQMTFLQRTQNAVVSAMMSLLSHWILSSNFDGLARKFLGEDETLLSAMSRADLWLYQTDNVLDFPAPSMPNMIQVGGLNVREVVPLAADLETFVQSSGEDGVVVVSFGSIVKTMPTERAEVWAAALARLRQKVVWRYTGEKPAGLGSNTKLMGWLPQNDLLGHPKTRAFVTHAGYNGVSEALHHGVPMVCVPFFGDQPSNAARVVARGLGVKVEFSTVTADELYKAILHVLTNNSYQETAARLSRLHRDQPQSPMERAVWWIEHVIKHGGLPHLRARAVELPWYQYHLLDVAAFLLAVCAAVLGTVWYSCAFVCRMCCRKSYDKVKGQ

SEQ ID NO: 8620 - protein, 540 aa, Temnothorax curvispinosus
MLSRVIFLLICCILMGDIVIASKPLSILVVETVPSPSHHVWTEHLVKGLLRKGHHVHAVSILETKVKGKLAQNLTYAVFDSLMETYDESFNYDPVEWEKYSVFYGAYFMYQWGIHACNTMIKAKAARDLLEVTKTVEFDVIVQDITLSQCFYGLWEIAKGKPPIVGYVPFGAIPYLKDYIGGPSYPTVRSYTHAAIAKPEGLWLRTWNTLYYIVDDLIRHYYFFPIIQRLTEEYVGHAIRPLHKIERESINIVLINSHSALESAIPLPPNTLEIAGLNAQAVQPIAGEVIVMYSEDVRIFLDGAKDGAIVISLGTNVKWKHFNLDTVKTVILALSKLKQRVLWKLDIEVPFEISENIMVMKWMPQSEVLSHKNVRAIWTHGGLLSAQEAIWKGIPMIVMPFFGDQKSNTRILVAKGVGIYLDIKTLSTQSILHAVEEVLYNESYTRNMKQLSSEFRDRPIPPLDLAVWSVEYTVRHPNGTLVTPLRSQSWVEQNLIDVYALLFLSFFIILLSIFFVIKLLINFYYNYMYTASNLRKSKQA

SEQ ID NO: 8621 - protein, 494 aa, Toxocara canis
MMHKTIISIFLLHCMAHISIAYKVAIFVPDISGSQILFNVRVAETLVANGHNVTLIRLDSLATKKVEPKISPLIEQWRVKAYPDDNDYAAMRAHHSTIIFTATSFFSNDVTKALRLFVSSFITACEIIVQNKELMSQLKEAKFDIAFTHFYDYCPIGLIYHAKIPTWIWLNGAQLMDVIAYLVGVPSPPSYVPLLLSDMSDKMSFMQRVKNFLGRSLMHPLAMRSIIDPETEIFRRYLDPGMPHLSELASQCPLVMVNSDELYSLARPTLHKLVYIGGLGMNSRNVKPLEGEFKKIVDRSKHIVVMSFGSIANVTLMPASWKDSLIGAFRRFPEIEFIMRYPARDLDHKLPSNVHISNWIPQVDLLQNEKTLAFISHCGFNSIQETIYSGVPIIAVPLFGDQFVNGRLAERRRIGIVVPKNEFTQKRITNAIEEILNNPEYKNNVQRLLAMIRAKPVRPDEQLVKRLIRNCYQAHRETSTIAQDVNKQITIVNK

SEQ ID NO: 8622 - protein, 345 aa, Vigna angularis
MAVCPTDDRHVAVLAFPYGTHAAPLLNLVRRAAAEAPEVSFSFFSTKRSNASVFAGLNEEQLLNIRPYDIEDGLPEDFVPSGNPQDPVAYFVKAMPANYRTAMDEAVEKTGRQITCLVSDAFFWFCADMAEEMHAKWIPLWTAGPHPLLAHISSQQIREKLGPDGVGENKEIDFLTGFNGLKAGDLPEGLVEMPEDPFSMMLEKMGEALPRATAVAINSFSGVHVPIAQELETRFQMLLNVGPFILTTPQSVTLDDEGCLPWLNSQEDKSVVYISFGSVIMPPPDELTALADALEEGKYPFIWAFRGNPEKQLPDGFMERTKKQGKVVGWAPKCRSLSIQQLVCA

SEQ ID NO: 8623 - protein, 517 aa, Bicyclus anynana
MCCCNSIVVLLTLVLNCCYGYKVLAVFPMPGKSHSILGEGYVRHLLAAGHEVTYITPFPVKDPPSRLRQVDISENFAFMRNILDVRKFMSKELDIQNYFLVHNVMNSMLYDTYRMPVIQKFINDPKEQYDAVVVEWLYSELSAGFSSVFNCPFIWASSMIPHTAVLSLIDGHVNPAYSVDHLSRDYTTTFWDRLYHWYYITKLSYQRWSERDTYNDQFKNVFGEAITRRGHKLPQFDDVIYNGSLMLGNSHPATGDNVALPENYKHIGGYHIKDVIEPLPKDLQKLMDESKDGVIYFSMGSMLKSSEIPDDIKNGLLEVFGVLKQTVIWKLEQVIPNVPKNVHVVTWAPQQSILAHPNCVLFITHGGLLSIMETLNTGVPIIGMPFFADQYLNIARASAKGFGMRLDLDEKAPEKLRVAIKNMVENPSYRQSARKFSAIFKDNIASPGQQLAYWVEYVIRTQGAFHLRSPALQTSWYKKLSLDIFLVLLLGVILSFKLCKSLLVVIKNGSGHKKKTA

SEQ ID NO: 8624 - protein, 503 aa, Trichuris suis
MPCWNLTAKLLFLLFDITAISNGHKILFIPGHRVPSHTKSMLPLARALHNAGHVVGFLQIVGAAEEKVNIEPMQDFTLNVTAEKQARSFFQRIWIADMRSPKEYLEPWRRAALACNKALLEYEESKSSIVDMVKKWDLLVIDNLFAPCGMVASSLTGVDWIDFSTTVMMADMFRRNGLEMPLSVIPGFKVKHNDFDHRSFNHRVSNAVDGLQFSLLKAALFFLFPYWIEQSAREGRIVSFRSKPVYTFSSVPTYLTFLEPSTISFVPLDYPCLNPPKLDELYKTFIEDKSSKGTILIAAGHSVRWELAPRLFLQSFTDELKNLSDYRIVWQYAGNQTAVEMPHVLARKWIPQVSILQHPKTVAFLTHCGYKSLREAICADIPVIALPFFGDQFRNAAMVRKLSIGVHVDKADVQKSALRSRCYEVIRNRKYKANVAKLNALLNDKIIDDNWKANFLINFFFRHRKQNRCFALAATSLSYVQLYCLDMFLIFLASIVAASGILF

SEQ ID NO: 8625 - protein, 514 aa, Riptortus pedestris
MGSVVRGLCFLILLAESRVLGARILAIYPYKGASHFYVFQPLMEGLAKRGHDVTVVSHHPRKEPLPNYRDISVADQKELTTGYVEATPIPKNSLFYENVEGLHQLATEYERILANPDVLALANSSFDVIFLEMFNSDLFYGLAYRIGAPVIGFSSCSLMPWTADSMAVPNQPAYIPNNLGVHDLKMDWWDRVINTLEIWASRVYYRLVIETEAQKIAEKYLGPLPQLSEIAANTSLLFVNTHYSLLGQRPYPPSVIEVGGISVTPAKPLPKDLDTKLNESSGAIYFSLGSVMVASTISKEMKNMFQSVFTNIGKTVLWKFEEKLEPNNPNIVTRPWFPQRDLLAHPKIEVFISHCGLLGISEAVVSGVPILCLPVSSDQPHNALFVEEIGIGMHLDISTLTPSQLESSIFQILSNKRYRERASEVSAAFRDRPLPPLETGIFWTEYLIRHGRNVWETSYKTMPLWQREGLDVFFPLVGTILMVLWGLSRIFGLWRCRSNRQVKVKSKNHKKKQN

SEQ ID NO: 8626 - protein, 521 aa, Zygaena filipendulae
MKWCYTILFFLYFCHIAAAANILALFSSLSYSDHLVFRGYVSLLTQRGHSVVVMTSYPGQFQHPDVENIVELDVSEESAKFWDEYKNLITNVDDYYPLMKSLNELSLKVAIAQLKSKQMTALLINPNVKFDLVVTDANVPLLYAAADKYNASHIAITPSSGKIHQYEAKGSPTHPLFYPDENTLSYGNIGFWQKITELKRYYHTKQEYSSNYLRLSQLAAEKLLGLKRDLRSVEFEIDVLFVACNPLLVGKRPNALNVAYVDGMHIKTDLTLLTDLKTVLDSATKGVVYFSLGTIQESEQLSPILLQTLADAFGELPYTVLWKIGNTSMIKLSENVIAYPWFPQQEVLAHPNIKAFITHGGLRSLEEAVFYEVPIVGLPLVKSRKTFMGEITKHGAGEILDPYYLEKNMVKTTILAVAGEEKYQTAISLLKSKAEDTAISGPDHAVWWTEYVLRNGGARHLRSPSVGISSISYYMLDILSLLIFAAMTTVYTSYTILRFLIRWCRMRFFGQTGLSGKFKAL

SEQ ID NO: 8627 - protein, 514 aa, Papilio polytes
MKVTLVVCSVLVLITCGQIKQVNSLNILGLFPFPGKSHFFVFKQYLRELAERGHNVTVVSHFPRTDNPKNYHDISLANTSEILEDVFEVKKSYWALLRLSFALVEWGTDNCRVMLSNKNVQHAWNTTKFDIVVTEQFNSDCSLGLAHHLKLPVIGLASHALMPWHYSRFGISFNPSYVSHMFLSGGTKPSLYEKVERVLFDNYLRFIYKFYCQRIDQNTLAQYFDDVPPLEELGRNIKFQLVYSYFVHFGSSLYPQNVIEVGGYHVQKPKKLPDDIRKFIEESQHGVIYISFGSMLRSTTTPREKIETIIGALKELPQRFIWKWEEDSLPGNPPNIYLSKWLPQNEILCHPNVLAFYSHSGLLGTSEALYHGIPMLAMPIFGDQPGNAAAIEESGLGVQIEFMELTKEGLLEKFKQILEPGFRAKVKTLSQAWKDRPVSSMDTAIHWTEFAARYPNLTFRSAAADVPLYQYLCLDVFFILLVIPLFIIVLFLRYMFGNKKETKTTNNKKKSKRE

SEQ ID NO: 8628 - protein, 1178 aa, Blattella germanica
SNTIKYDLVFIEELLFPCYYGLVHHLGSPPVIAIAPALFFCSQVGDYASPENPSYVPSVLLPYTDSMSFLERLQNTLFFLFARTSLIFNYPVPLPPSIVTFRNEINQMMLDPLPKDLQRFLDDAPNGIIYLSFGSNVHSARMPKDKIYVFLDVFSELPQKVLWKWESDVLPAETSKVKFDKWFPQPEDHPDNGIEKAVWWTEYVLRHKGAKHLQSARKDLDWHQYLLLDVLASIIFAIIIMLYRSFWLLLLISYNESAKILGIFPMPAYSHQALYQNIMKALVARGHEVTVIGTNPLQVTIANYTDIDISFSYKFHKDEHNFEDMIHQKTIDFLHSQIILQPAIADLQLSSPQLQEFIRSNKIKYDLVIFEEILFASYYGLVHHVGSPPVIGITPFQYYWTQSIEFAASENPSYVPNLLFPYTDNMSFFERLQNTVTLLYLRYVLYSRVISENERVMRKHFGVAPPSITEAINNKSLFLIGSNWAFSYIHPLPPSAIRFQNAIIKKVLEPLPKDLQEFLDDAPNGAIYVSFGSNVHSARMPKKKIQAFLDAFAQLPQKVLWKWESDRPPSASINIRFQKWFPQQEILAHKNMKLFITHCGLQSLQEAVYNAVPIVAIPFFADQIFNAKKVEREKIGVQMSILHLTKDGLLNSINKIFNDSRNNAKRFSSLTRDELHSGIENVVWWTEYVLRHNGAKHLKTGATNLNSIQYFLLDILAFIVFSIALITICFFFFMFQHSFLLLLFLSCANAAKILGIFPIPSFSHQKLYQNIMKALVAKGHEVTVIGTDPLKEPIENYTEVDISFAYKLHKNENNFEDMVDQTPYEFLYSQVSVHPKLADNQLSSPQLQGFLRSNKIKYDLVLLEELFSPCYHGLVHHLGSPTVIAISPIQYFVTQPNYLALLENPSYVPSLLFPFSDSMSFLERLQNTFFLFYARYMVYTVLYPENEKVMRKHFGTAPPSIIEAMNNKSLFLVGTSWMFNYPLALPPSAVTFHNANIKTALDPLPKFRKWLPQQEILAHKNTKLFITHCGLHSLQEAVYYAVPMLVFPFFGDQPLNAKKVHTKKIGLQMSIHDISKDALLNAINKIYNDSRHNAKMYSALAKDTLHGGVEKAVWWTEYVLRHKGARHLRSAALDMNWYQYLLLDVIIFLILSASIILFFFSFIIYKIFRYFSRNNNLI

SEQ ID NO: 8629 - protein, 401 aa, Papilio polytes
MLSNKNVQNAWNTTKFDIVVTEQFNSDCSLGLAHHLKLPVIGLASHALMPWHYSRFGISFNPSYVSHMFLSGGTKPSLYEKVERVLFDNYLRFIYKFYCQRIDQNTLAQYFDDVPPLEELGRNIKFQLVYSYFVHFGSSLYPQNVIEVGGYHVQKPKKLPDDIRKFIEESQHGVIYISFGSMLRSTTTPREKIETIISALKELPQRFIWKWEEDSLPGNPPNIYLSKWLPQNEILSHPNVLAFYSHSGLLGTSEALYHGIPMLAMPIFGDQPGNAAAIEESGLGVQIEFMELTKEGLLEKFKQILEPGFRAKVKTLSQAWKDRPVSSMDTAIHWTEFAARYPNLTFRSAAADVPLYQYLCLDVFFILLVIPLFIIVLFLRYIFGNKKETKTTNNKKKSKRE

SEQ ID NO: 8630 - protein, 435 aa, Necator americanus
MMSFLDQPVKSSKFVVEILKNKQFLEWLEAEKFDIAFAHMFDVCTVGLVHTAKIPSWIWLNSGSIMDYVAYAVGVPIIPSYVPPMMMDVAGEMNFIERTKSVIGHVLMKVLWKRLIADPETELFRSLIRSDFPDLVDLSSKCPLVMANTNDLYDMTRPLLAKVVNIGGVGMEVVDAKPLPKNIEEIVAKSEGTVLFSFGSVTAAHKMPMEWKKSFMKAFKSFPNYQFFVRYEKEDLDDFLPGNVHLFKWLPQSDILRHPKTKAFITHGGYNSVQEAILTGIPLIAIPLFGDQLKNSRLIEHHGIGVILQKAEISTQTVIGAIEEVTGNSRYSKNAKRLSRMVERKPVSSAHLLVKWAEFVAEFRTLENLEPAGNKLNFFQYHSLDVLFNKRVAETLADHGHNVTVVLMQAVDDRAEAEIKFKENVNGRFSRETDR

SEQ ID NO: 8631 - protein, 521 aa, Papilio polytes
MNDNSRTFFLTIILTILFKYIQCGRILAVFPTPCISHQQVFRPLTLELLKRGHEMIVVTTDPMFPKHRELKNLTEIDLHDISYEAKDIILNEATPNKRSPLAQVFKMTELFTNLVEIQFRSKEFQKILKNNHTQYDLIIVEAWVRPMLVLSHVFKAPLIQLSSFAGLVYNYEALGVPVHPLRFPTFIHKKINNLSLWDKLKEVHLFLWFKYIIESSERAENAMLRRIFGPGVTISELSNNIDLLLLNVYPMWAGNIPVPPNVVYIGGMYKGTEQDLSEDLKLFLNSSKNGVIYFSLGSNVKSSQLSAKTIRMFLEVFSRLPYDVVWKWDRKELESEIPRNIMISDWLPQSSLLRHPKVKLFITHGGLQSSEEAISAGVPLIGIPFYGDQFYNAERYEQFKIGVKIDFDKITEHHLYKTIMSIVKDKSYRQNMIRLRSLMNDQPQCALERAVWWTEHVLRQKGAKHLRSPTANITWAEYLEIDVFIVILVLILLCTTSSIWLLYCVMRYMIITMFNVKIKTD

SEQ ID NO: 8632 - protein, 495 aa, Toxocara canis
MGHSHMNFLGHLADTLVRAGHDVVVYTPEYDTRIKTNGTKLARVIRRSSKFTLPPDSNHLNDNAWIRDGDDISEVYYMISRISSIQQTICEDSLSDEKLLAQLRAEKFDVGISEVISSCGFGIFEKIGLKKYIAAFATNLLPISTEPFGIDNNPSYVPATFARTSDSMNYCERVENFVSTLITYVIGRVMKRKVVDKAFHKYIRPNFDVHKTIAKSTFIFVNADEFVEFPRPITHKIVYVGGIAVDPPKPLDGELRKAMDAAVGGAVLLSFGSIAQSSKMTPAMKKAFVEAFRSFPKIQFIWKYEIDDDIAEDIPNVMKRKWIPQNDLLGHPNMRAFVSHGGMNSLTESVRAGVPIVCIPLFGDQMRNAKMVEKRGVAVVLEKHNLTANAILWAFTTVLTDQSFLESSRRLAKMIAKKPFPVDERVVKYTEFAIEFGQVNNLDSAARKLNFSQYYLIDIIVPLLLILLFFIYIVAWIIIYVFRRFFNSISKSKLD

SEQ ID NO: 8633 - protein, 211 aa, Theobroma cacao
MEIFEAMNMRTKPLLKDMLVEMIPPVDCIIGDGILEFVLDVANELGIPIINCRTIGACFLWSNYSIPDMIEAGELPIKGSEDMDRPITAVPGMEKFLRCRDLPSFCQASNMSDSTLLRYGTVTRKSLTASGVILNTFEELEGPMLSQIRSKCPNVYTIGPLNEHFKTRMSLENGVSSQSSNYFWEVNRSCMSWLDRQPNQSVVYVSLVALL

SEQ ID NO: 8634 - protein, 343 aa, Oryctes borbonicus
AFIFSENVGTLLQEQSRLSSFTMMKILPEILNMTLHSHAMQELLKPDNKFDVIIQSYMFNEAFLALSHHFNARVIGFVPFSTLPHIVSLTGNSAPYSYVPLPFSGHTDDMSFLQRTVNMIAGQFVSLLYNCCAYPKQEKIMRERFPDFPPLAEIERERVDLIFSNNHFSNESPRPQTPNIIYIGGYHVQEPEPLTPEVQKILDNSPEGVVFLAFGTHVQVEKLPKEKIDAFLNTFSKIPYKVLLKYDGFLANKPENVETVAWIPQRGVLAHRNVKIFVSHGGKGSATESLYYGVPVLCVSFFGDQWKNCEDIAEYNYGIHLPFQDVTKETFENAFDELDSNPK

SEQ ID NO: 8635 - protein, 528 aa, Haemonchus contortus
MLTLILLCGFLAVNSYKILVFSPTISRSHMISNGRIADELAKAGHHVVLLEPDFLNISHTVQSSKVAHRMTVSGFSSILHDVIQGFSGTAFEKISVYSEHRGILEYSRAYNQLCDDFLSREDLIEKLRAEKFDAYFGEQINLCGHGLAYILGIKSHFWVSSCPISDYMAWLLGMPQPSSYIPSLIGMDITHRPSYWERAQNIWSTFLYVQFARRGTVEATEMFRKRYGENFPNLEAIAADSDMVFVNTDEFVDFPRPTLPHVVHIGGLGEGSSSKSLKLDKIFSEQMEKGSKGVVYFSLGTLVNTSSLPAFAMRAVVDAVKKTPDYHFILVTDSRDHFTRHLSRALPNVFLCSWAPQAALLSHSRLQAFITHGGYNSIMEASRFAVPLVTIPFYFDQVRNSRAAELNGWGIPVNRFSLRDNPDGLYKALHAILSHKRYKQAAVRISTLIRTKPFNASEKLIKYTEFVLMNGGVKELLAEGRLLPFLQYHNLDIFIPLGVAFIFACWIFFRLVCTIFFIAFPPIKQKLQ

SEQ ID NO: 8636 - protein, 527 aa, Daphnia pulex
MVLNKFILLLLFVIGLIEASRILVSCPYGTKSYQNMYVPLVKELASRGHHITVVTNYQSSELDQTDNVDQIVFDQLAIDMSQFPNPFDAMLSKLVLLKSMALGVENMFTRPGIIAETLYNDQRVRDLMANDHFDLVMVSITFNAASYPLAWHFKTPLVMMTPNAIFPGVITSLGEEEQPSHIPFFMSSFTNQMNLFQRTVNTFTTHLFGYFIHQFHHEKIHGIVRKTILPDCPPLLELERNISLVFTNTHPSINYARAMPPVIVEVGGIHCRPARPLPRDLENFLADSDDFGFILFAVGSMLPMEKMAEDLAQSFIQTFARLPQKVIWQWKGKIRTDLPANVLAIPWLPQQDLLGHKNCKLFITHGGLNSLQEAVYHGVPVLGLPFGTDQKLNMRRAIDDGYATKLAWTEINQESLTSAIIDLLYNKNSKNVSYSTAAKRQHDLIHDQLQTPLERAVYWTEFVIRHGTEQLKMGSRHLNSFQRNLIDVYLIIIISAIVPLLLTFVCWRICCCRRQGNSQVDTNKKMK

SEQ ID NO: 8637 - protein, 248 aa, Temnothorax curvispinosus
ILQDVRIFLDGAKNGAIIISLGTNVKWKHLNLDTVKSVIRALSKLKQRVLWKLDIEVPFEIPENVMVMKWMPQSEVLSHKNVRAIWTHGGLLSAQEAIWKGVPMIVMPFFGDQKSNTRILVAKGVAIYLDITTLSTQSILHAVEEILYNESYTRNMKRLSSEFRDRPIPPLDLAVWSVEYTVRHPNGTLVTPLRSQSWVERNLIDVYAFLFLSFFIILLSIFFVIKLLINLYYNYVYTASNLRKSKQA

SEQ ID NO: 8638 - protein, 518 aa, Onthophagus taurus
MSPLIQSLFLLITLFSLTSSENILFVTTAPLYGAQMVLQPIWTQLSKSHTVTVITPNPTNQKNNTNLKEIDIKFIYEFIEMKYDFSQYVAKYKDEPLRYSTFLTTVLTGINNEVLKHPDVKALIKDDSLSFDLTIVEFITVPTMLAFGHRFKTPIIAITTTDASVLGQDSIGNPNHPALNPDLMLKFHGDLSFMQRVFSTLSLVSRKAVAHLVKRVEDETVSKHFGDNYPSLDELTDRIDLFLMNVNLGFHNLRPTVPAVVHFGGEMSVKPAGKLPEDIKKFLDDGKDGVVYFNLGTVIRARMIKPELLEAIFTSFARLPYRFIIKLDVPDTYPGKPDNIMIKTWLPQQDILRHENVKVFITQCGLQSIEEAIYHNVPIIGLPFFGDQYSNCLQAEEKGIGIIFDVNRLDSRKLIAAIEEVINTPTYEEKTKMISKIALDQPMTGLERATWWINHILRYKGGKHLRAPSLNVPFWKFYLLDVLAFIGFIVLSVFRVLYFLIKKCLRCCIKKSHKTKSQ

SEQ ID NO: 8639 - protein, 508 aa, Bombyx mori
MKLIYLLLLLVTCYTDGLNILGIYPYQGKSHFFVFRVYLRELAKRGHNVTIISHFPEQDPPANYHDISLAGTIKITEDNQSVRNSYWSVFSAAFYLAISGKENCQVMLANKQVQELIKSKQKFDVVVVEQFNSDCALGVAYKLGAPAIGMSSHTLMPYHYKRLGIPYNPSYVPFHFLEGGTKPSLFHRVERLFFDFFFRTFYYFVSQRSDQNTLAEYFDDIPPLEELARNMKFHLLYHNFILTGSRLFPSNVIEVGGYHVSNANPLTSDLKKFVDEAEHGIIFISFGSVIKSSTMTTDKVEAILEVMKRMPQRFIWKWEDKSLIVDKNKLYVSHWLPQVDILGHPKTLAFLSHAGMGGITEAIHFGVPVVAMPFLGDQPANAADVEESGLGIQLQFRDLTTESLLNAFQTVLNTTFREKVKKVSKAWHDRPMPPLETAIYWTEFVARNPDLNFRTAAADTPLYQYILLDVIAVLLTPLIIIFVALKRTRKSSAPIVKKTNGKKKSKKT

SEQ ID NO: 8640 - protein, 519 aa, Atta cephalotes
MRVVTVVLLSISLFCTFQYSHGYDILGICPSTSYSHQQSFQALMKALAFRGHKVTVLSTVPLKNAPPNYENVDLSFSYISKDCTGLRHIGAYALFHQNLLGANHICRHQLFSPAIDKLIASNKTFDAIIIEQLWYQCYYALVKHYNFPVLIGFLSVGNLPYVMDSIGNPDDPNFNPDMTYPFTNRMTINERIMNILYTTYTRLYYRYWHLPKAQHMANKRIPGTSVYDIDKNFSLVILGNNHVFGYPKPLLPHMIEVHSLHILENPGSLPKDIHEFLDNAQDGAIYFSLGSNLQTDQLPAESLTALCNALGSLKQRVLWKHNSNMAIHATNIKFVKWVPQQAVLAHPKVIAYMMQGGLQSLQEAVHYAVPVIAIPFFGDQYFNARKILDAGIGLTLNIDTITENSIVQTLTEIVKNKTYLNNIKTMSAIVQDELVKPIDRAAWHVEHVLKFPNSRHLRYHGHDMSWIHYYATYLCLGIGFVLLLYIYYILYNKIISPFVKMTCLSNLKQWINNLKRKLD

SEQ ID NO: 8641 - protein, 434 aa, Medicago truncatula
MDAPSPLHIAMFPWFAMGHLTPYLHFSNKLAIRGHKISFFIPKNTLNKLQHLNLHPNLITFFPITVPHVNGLPHNAETTSDVPFSLFPLIATAMDQTDKQIELLLKELKPQIVFFDFQYWLPNLTQKLGIKSLQYLIWNPISSAYLGNIPRKSQGKYLTKDDLKKPPAGFPDSSIKFHSHELRFLASTRKIEFGSGVLLYDRVDTGTKSSDAVSFKGCREIDGLYADYLETVFGKPVLLSGPLLPEPPKATLEEKWLTWLKEFKHGSVIFCAYGSEALKPPIGFESIEEALPEGFNERIKGKGIVYGSWIQQQLILEHPSVGCFITHCGAASITEGLVNTCQLVLLPRAGADHIMNARMMSSTLKVGIEVERGEEDGLFTKESVGNAVRIVMDDENEVGKEVRANHAKMRNFLLSSNLESSCVNSFCQKLYDLL

SEQ ID NO: 8642 - protein, 1065 aa, Papilio machaon
MLVSVLLSLIVISTFNKSNEVNSLNILGVFPYQGKSHFYVFEPYLKELSNRGHNLTVISYFPQKEPLKNYHDISLAGKSMIFEGIVPFQKHSSLTNMLTSLGLSYLAVDNCHIMMDDEEVQDLWKTKMKFDVAVVEQFNGDCALGLAYILNTPVIALTSHLLMPYHYDRYGISYNPSYIPFLLLEGSTESTLMQRLAHTISHIYMKFIYQYLTQRYEYKIISKYVNNMPPLEELGRNIKFLLLYNNMMLTGSNILPANVIEVGGYHVAKPQPLRDDLLKFIEESEHGVIYISFGSMLRTASIPKDKMQAILTALAELPQRVVWKWEAKSLPGKPKNIFVSKWLPQNDLLAHPNVTAFYSHCGMLGTTEALYHGVPLVGMPMFADQFRNAAAVEESGFGVTIKLENLTKDNLLKKFKTVLDPMFQANVKLLSKAWHDRPKSAMDTAIHWTEFAAKYPTLTFRSPAADVPLYQYLCLDIIFILSIIPITVICVVAIIYKTYFKSKSKQKSIKRSIFSVPIQGNYYIDYESDAVTELHETDLDCRDECISSITKMKITLVVCSVLVLLTCVEIKPVNSLNILGLFPFPGKSHFFVFEQYLKELARRGHNVTVVSYFPQKVKAKNYHDISLANSSQILEDVFEVKKSYWALLRLSFALVEWGTDNCRVMLSNKNVQHVWKTTKFDIVVTEQFNSDCSLGLAHHLKLPVIGLASHALMPWHYSRFGVSFNPSYVSHMFLSGGTKPKLYERIERVLFDSYLRLIYKFYCQRIDQNTLAQYFDDIPPLEELGRNIKFQLVYSYFVHFGSSLYPQNVIEVGGYHVQKPKKLPDDIRKFIEESQHGVIYISFGSMLRSATTPREKIETIISALRELPQRFIWKWEEDSLPGNPSNIYLSKWLPQNDILSHPNVLAFYSHCGLLGTSEALYHGVPMLAMPIFGDQPGNAAAVEESGLGVKIEFMELTKKELLEKFKQILNPEFRAKVKILSQAWKDRPISGIDAAIHWTEFAARYPNFTYRSAAADVPLYQYLGLDILLILFGIPLLIIVLFLRYIFNKKKTNSTSKNKHKSKKE

SEQ ID NO: 8643 - protein, 410 aa, Drosophila sechellia
MLSGPGIAGLLLTVLLFGLLCPKLANSENILAVFSYTFGSSYLLITPFLRNLVQRGHQITLISAVTIMPHIEGVHHIRVPKLDMLMKILLELEFDTEIPKWTEAQFLSEYFYNCSKFVLEDPGVQELLHNASAKYSLIILEASHNDALYGFSQHFNAPLVGIAAYGSSWNIDFQVGNSAPSVYEPISALGYTAGFSLMEKWHNLIFITEERLVERFIYLPRQIDLYKQHFPGATTSIHDLRRRFSLILINQHFTMGRVRSNVPNIVEVAGMHLDEKPYPLDAELKKILNEAKHGVIYFSMGLQLLETWLPPGMRATMSEAFAQLKQQVIWKSDHPEMVNQSRNVFARTWFPQRAILNHPNVKLFITHAGLLGLIESVHYAVPLLCIPLFYDQFQNTQANGEVGRGQASGL

SEQ ID NO: 8644 - protein, 242 aa, Ricinus communis
MAAQQHVAVLAFPFTSHPIALFNFVSSLATAAPKIQFSLFSSAKSNNSILSTAQNPRRIPANIRTYNVDDGCVSDGDIGLVKEINCFLNEFPGNSTASMDAVQMETGKRITCFITDAFFSSAVCKTAKDMNVPWILFWVPAPHVLPAYLEVDLIQQIYDNNAQAQQQPGGVILHDIIPGFSPISLLDLPSTIFQHEYRYRDSAKQMRSVLLSKTMSEASTVVMNSYQEINPAILTDYLKSKF

SEQ ID NO: 8645 - protein, 528 aa, Daphnia pulex
MKLVFVLVVFVTWLAVSEGSWILIVAAHGTKSHQNVYVPLTKELVGRGHHVTLITNYDIGEVAQHDNVNQILLEQLALDTSIFPNMFKALTGTWRDKIEMGVQVARMMFTFPAMVAETTYGDSRIQTLLAKGKFDLVMFSEACGLTCYPFGWHFKAPTIAMSPNVLFPGRAALLGDEEHYSYVPFILSSYTDKMSLNQRLGNYLISKLFNTFVHDWHIDSVHSIFKKMVDPDCPPFIEIEKNFSLVFTNSHPSFSYPRTLPPQVIEVGGLHCRPARPLPDDLEAFVSSSEAGFVVFAIGSAIKMEDMPEEMIQSFIKAFARLPQRVVWQWKGKVRSDLPANVLAVPWLPQQDLLGHKHCRAFLTHGGLNSLQEAVYHGVPVLGFPFGTDQTLNVGRAVKEGYAAKLEWKEITQETLIKSIQEILHDSKYKKSAKRISGMFRDQIQPPLERAVFWTEFVLRHKGTDHLRLGSIDLAPYQRALVDVYFVFSLFFIIPLLLVFFCVRKCCCANKRPAAPPAVRNEQIKKRQ

SEQ ID NO: 8646 - protein, 437 aa, Wuchereria bancrofti
MYHVEWYLASLIIIFHASQNDSYKILVYNPRFGKSHTKFLGSIADTLVNAGHNVTEFAPVLFEFSDSTGSKLAKTIKIDADPEISKIMNVEIFAQDAWKQNQQSIFSLISVLIMKRMSDALVKNCEFQLKQEKIMQELKSEKFDLAIFEFNQCFAGMIELLHIPAHVVVSPTALFEYATECFGVPNIPSYIPSLLTQYTDKMTYLQRLKNLIITILTTKLLDNHTIRCQALFRRLYGDQFIDLKEKLAQVTYVLTNTDPLFHISRPTIHKILELGGLALPKPQPLSKKWIAVMNKRKTVVLVSFGTVTLSCWMPNKTKKALLDAFDSFPNVTFIWKYEKDEHRIAEGHPNVITSKWLPQSDLLAHKNLIAFLTHGGMNSITETLNRGKPIVVVPLFGDQMQNAVLVQRLGLGIKLSLSELAIEGKYKMQSIISSMIK

SEQ ID NO: 8647 - protein, 521 aa, Trichogramma pretiosum
MLSYTSKRLCLAGLMLLLMLSLDRRPGAEAFNILGICPSTSYSHQQPFQALMKALAQRGHKVTVISPIPLKKPMENYTDIDLSFTYQKEDCTKLRHMSAYEILRKSMKQSNKLCEKQLFSDPIAELIARNETFDAIVIEQLWFQCYYSLVQHYNYPVLIGFLSVGNLPYAMDSVGNPDDPFLNPDMAYAFAGRMDFKERVWNYLYTTYTRIYYNYFHLPEAQSIAARFSPGVSCFSIDRNFSLVILGNNHVFGYPKPLLPNVIEVHSLQITGNPGKLPKDIQEFLNNATDGAVYFSLGSNLQSRQLPPLALKALSDAFGSLKQRVLWKHDGHVSAQADNIKLVEWAPQQAILAHPNVKAYIMQGGLQSMQEAVHYGVPLLALPFFGDQNFNGRKIVDAEIGLILHVDTMTSHSIKVAVEKLIYDPKYSRNIQKMGNILKDEIINPLHKAVWNIEHILKFSPSNHLRYHGHDISNIEYLATYCFIFSIVLFGISLLVWILVYIFRSLLHIGNDVIIKKKKHD

SEQ ID NO: 8648 - protein, 518 aa, Myzus persicae
MNNYNFIVWIFKFLTLFTASQSANILVFAPMPFKSHFRGFQPLFKELASRGHNLTVVSTFPLKTPQPNYTDIPISIDENILKGVDPMELASHGFLTVVPSLWKMSTFLAKKIIPKPEMQNFILSQDYEFDLVMVFSFCQEYSITLGHKYKVPVINLGVSTLWPSNSKWIGEPSTFSYILDQRTGATDQMSFIERFKNTVIGIYQLFLEDYYYLPLQKDTMEKYFKYKGHESRPPIEDMLRNVSVTLLNAHYSIGVTRPYLPGTIEIAGLHVNEPKPLIGKFLEFVDSAEHGVIYFSFGTIVDPSKLPNSTIEVFINVLKKLKQKVMWKWDSKNLPTQLPDHVMVSDWFPQPDILGHPNVRLFITHGGVHSLEEATYNALPIVGIPFFGDQHMNMRLAERNGIGKMVDHIDLNEKSMLSAIDEVLTNPKYKENSRIRSKIFKDSHLRPMDRAVYWIEYVLRHGGANHLTSSSVVLNYNQYFLADICLVIISTTAISMFLIAMLFKYTMKTKDYNSLKKK

SEQ ID NO: 8649 - protein, 513 aa, Heliothis virescens
MLLPIVFMLFAGASQGYKILALLPYPGKSHHMVFEPVLNELASRGHEVTVVSFFPSAKPIKNRRDVSLVGLAPLNVEVVNLQNFDDPSFFARKFSTPYNLVANVMDLNLQLCEKVLYSDVFKEFVDAEGAYDVVLTEHFQTDCMMGIVHNYGAPSVGLMSCALMPWTPARVGADGNPAIFPSMLLPFTDEMTFLEKLENSLNVHFYILWHTYITRNEQSVVEARLGRKLPPLEEIAKNASAVLVNTHPSLNGVRALPPSMVEVGGIHLHNKTVQPLPEDIEQWVSESKHGVILFSFGSLIRGSTLPPKHLDAILKVFARLPQRVIWKWETEDIVGLSENVLVRKWLPQYDLLHHPNCVAFITQGGLLSLTEAVAAGVPLVVVPVLGDQPGNAAYAKRAGIAEMLAIHDLDEESLYEAIVKVLSPEMRARAKAFSSLWRERPASPMDTAVHYIERAARYGHLNMSSHSRLLTKPELLFFYSIEYVVLLGIVFPIFIFVKCCCCSRKTMDKLKHD

SEQ ID NO: 8650 - protein, 436 aa, Myzus persicae
MRTGMRLVSGTAAAVMIFALAGWPGPVPSGCARILAVETVGGRSHWNFMSGIIRALVDNGHTVTAFTPFLDGDRENYTEVDISNGFPVGLDLDLVGLLDHFRNPLWTYGSFVEMGRSQCDVVYGSDEMKKLLQDRPQSSPAAFDAVLIESFWSECMSYVAARLGVPLIYVTPLPLIAFMERTITGHVSNPAAVSNLMTAHAVPETFLERLRNAALLVYGSVAQRYMELVLKYTEPPKEYDLLDPVPPSLVFVNRHFITDAPSPVPRNVVDVGGIHLKAAKSLPKDVLEFIEQSPHGVIYFSFGSTVKMSTIPESVKKALIKALARVPQRVLLKYEDEMEDKPKNMMTKKWLPQRDILLHPNVKLFISHGGISGLYETVDAGVPVLGFPLVGDQARNIDNLVNADMAISMDLLSVTENSFLNNVLELLNNEKYSMSA

SEQ ID NO: 8651 - protein, 375 aa, Trichoplax adhaerens
YDLVISDRMFMCNTLFAQAIGKQNVLYSTGGFGLRRGVLGNPYPLSYVPQMSTTFTPEMNLLQRCINVLVYLIGEIVYRVMFDPMTENLMRKFNISTHLSGADLDNTPSLVLLPVDFALEYPRPVLPNVKIVGPLTPRPASPLPSDLEKFVNESPQVVLVSFGTILDGLSDEKIAILLEAFNKLPYKILWKSKNVDLKTGKNVKIVKWFPQNDLLGHNNVVAFVTHCGHNSMYEAAYHGVPVIGMPVFGDQPDNLQQLLRRGVAVGLNTGNLTVDGVINAIKTVVTDDRYSRKMKELSVVIKSRPRTPLQTAADWIDYVLISNGAKHLRVEKYNLNFIQYYLIDVCFVILSIIYIIFKIFQFICRKCCRRQSKSK

SEQ ID NO: 8652 - protein, 419 aa, Daphnia pulex
MFTRPGIIAETLYNDQRVRDLMANDHFDLVMVSITFNAASYPLAWHFKTPLVMMTPNAIFPGVITSLGEEEQPSHIPFFMSSFTNQMNLFQRTVNTFTTHLFGYFIHQFHHEKIHGIVRKTILPDCPPLLELERNISLVFTNTHPSINYARAMPPVIVEVGGIHCRPARPLPRDLENFLADSDDFGFILFAVGSMLPMEKMAEDLAQSFIQTFARLPQKVIWQWKGKIRTDLPANVLAIPWLPQQDLLGHSGCRGFITHGGLNSLQEAIFHGVPVLGLPFGIDQYLNLARAVNDGYALQLEWRDVDESTLSAAIDKLLFNRSFSIAARRLSGLLRDQLQSPLERAVFWTEYVIRHNGSMDHLRLGSRKLAPYQRSLIDVYLVLVLIASLPLWLVFLCLRCCWSTKTKAATAMSKKSKQE

SEQ ID NO: 8653 - protein, 515 aa, Danaus plexippus
MSVVTTLIKISILLSLSNNIGKVQTLNILGVFPASIKSHFFVFEPFLKELVNRGHNLTVISYYPQKEPLKNYNDIDLSQNAQALELSHPITDSLFMTVMSMTVGHIVVAPLSCRIMLDDENVQNLWESETRFDLVIVEQFNSDCALALAHRLKAPVIGISSHMILPWHYDRYGIIYNPSFSLFDFMEGGTKPTFLQRLKRSFLYHYVNIVNRYITQRLEYSIVQEYFGNLPPLHELGSDIKLILVYQNFIFTGSSILPPNIIEVGGYHVKKPKELSGELLKFIEDSEHGVIYISFGTILKPSSIKPEKLKSIIEALEELPQRVVWKWNKRTLPGNPKNIYLSKWLPQNDILAHPKTVAFFSHCGLLGTTEAISHGVPIIGLPIFGDQPANAAAIEESGLGVKITLNLLNKDNLLKKLRTVLHSEFRENVKRVSAMWHDRPIRAMDSAIFWTEYAAKYQNISLRPPIVDVPLYQYLCLDIIFTFTCFLIFFILFIKFSVLFLMFPFSNQTYNKKLK

SEQ ID NO: 8654 - protein, 515 aa, Pieris rapae
MMYKIVTLFVLFCVCDGFKILIFFPIPGKSHSILGEGYVRYLSNSGHEVTYVTPIIMKNPPPRVRQVDISENIGLLPGHIFDIQKLMYKELDLQEMYIIRSVIRNFINGTLQASTMQNFMHDPKEEYDVVVVEWLYTELGSGLSAVFNCPLIWSTSTEVHSEILSLIGDGLNPAYSVYIWDREFSTTFYYRLRHLWLLFKDFYDRVIYKAIEDKMFEQSFKSAVESRGRTLPTFDEVRYNASIMLGNSHISTGDPHSLPQAYKNIGGYHIKEKIEPLPMNLQKLMDSSKHGVIYFSLGTMLRSSALPEGKTRELLDAFGTLKQTVIWKYEDQLTNVPKNVHVVQWAPQPSILAHSNTVLFITHGGLLSLYEILSIGLPLIGIPMFGDQFTNVNRAVKNGYAKRFDIGEQPIETLLHYIKEIIENPKYRERAKEMSRIYHSRTADPGVELVHWIEEVVTSQGASYLRSPALGIPLYQKYYLDFFAVIIVVFSTIGYLVRTLLSNLFKKSLDIKKIN

SEQ ID NO: 8655 - protein, 525 aa, Trichoplusia ni
MTKHIILSLYFIATIFATDCYKILGIFPSLDRNHYLTYRELIRELANRNHEVTLISHYQMPDAPASYKEILLSEDLQKVYKDLSFESVIVNEVSRVPIETLEATKTGNDDCKTLMNNHQVLHMLRTRPRYDVILVESYNSDCGLALAANLSAPYIAFNPHPLQPWHYSRLGINFNSAYVSQSGLSYGKGPWYFERLKSYVLYYITNCLYYVASQVTDHVYLYKYLGDDLPSLESIASHARLVFVNTHQSVYGGVARPDNVIDIGGIHVRPPKILPTEIERFINEAEHGVIYVNLGTATKDATLPGDKLNELLSTFGKLPLRVLWKWDGGNLQLPRNVMTMKWLPQYDILKHENVKAFISHAGILSTIEAIDAGVPVVAVPLFGDQYGNAAALQDSGIGTIVHYQDLKKEYLLDAINEVLDPIWQQRAKFVSRLWHDRPMSPSETAIYWTEYVARYQGAPNLQTASANVPFYQQLEIDVLAFIVLVLYILSYALYKILSALCCCCSRSEATESVEERRSSKRVKFE

SEQ ID NO: 8656 - protein, 509 aa, Caenorhabditis brenneri
MSTVSYILQEEGYNVTLLLPLIDVALKDTNLPITKKIKHQIKLDIHPGVLRAITAMGGKAARQQTWTFGSGIYGFYSIKHHLSDLYSYTCDGIFHNTELLERLKTERYEIGLSEPFFVCGFALFDHLGIKKILSIDSHIGLEGPKMAHGDPITSSFLPAAFSEGSDQMTFYERVLNLYETYLNRQFALLIHRKEMEGMKGIYKGLETWEELMRLPAYMFTNGNPLMDFPHPRTSKFIEVGGIAADEKRVDEVLPEFYNNILNLRNQTVLISFGSNARSTFMPIHMRNSLITALSEMSHITFIWKYEDTSVNIVKEFDESIENIFLVDWMPQQALLSDPRLSLFVTHGGLASTNEVAFSGKPAVMVPVFGDQTRNSRMLERHGGVLVLRKEQLQYPNAIKDAILTVLNDKEFARRACNLAELLNNQPQSPKDVFLKYFNFVARFGKPSGIDSSAPQLSFFTYYYIDLILVLLSIFITISIVLTSGAYVILFRIFNCKKGKEAITDKKKIN

SEQ ID NO: 8657 - protein, 254 aa, Caenorhabditis brenneri
EFTSRISEYPEGFVVLSTGFTAQWSKSPESIRQAYLQTFKAFPKILFIWQFDSAFEKSTVLPANLLIKPWLPLQDLLGHQKCLCHVSHGGLNSVIESVYHGVPVVGVPLTARGVDNLLRITARDSGVMIEKEEFGAEKLIGAIKEVIGNEKYKKEMLIFQDMVTDVPYTELYHAAFWVEFIERHQEVPHARSGADHLNFLQYFLVDVIAFFFFVIFCTISLIYYMIRTVIRTIRSVINGIRGVPRIVTKGKKNN

SEQ ID NO: 8658 - protein, 536 aa, Caenorhabditis briggsae
MLKCWLLLSIIGWVTAGDVLFIPSTLYPVHGQTMAVLAKELVDRGHQVTWLEIGTKQSDLVLPSEVTREFWPAQFGDSTLQDIYQYRNHSSHSQLWNPEHLNENEQTTGWLASIRLCDSVLTRSRSKFDRLVEKKFSTVIVDDLYNPCGVLIAGLKKSVYIYWSITGLRTESAWANQSPSPPSYLPVAGTGLTDDLTFSERVYNVASYLKQLYLHQHIVQPRVDAVFQKHYPGVSTMFDIERNASINFVNTPPIFDFSRPYMPRVNFVGAIQCRKAKELPKEFATKISEHPEGFVVLSTGFSAQWTKSPESTRQAYLKAFKSFPKLLFIWQFNGKLPEGSKAPSNLITKPWLQLQDLLGHEQCRCHVSHGGLNSVIESVYHGVPVVGVPLTARGYDNLLRITARDSGVMIEKSEFNGDTLTAAIREVTKNEKYKKEMLIFQDMVIDVPYTELYHAAFWVEFIERHQEVPHARSGADHLNFLQYFLVDVIAFFFFVIFCTLSVIFYAIHTVIRTIGSVINGIRGVPRVKVSKGKKTN

SEQ ID NO: 8659 - protein, 371 aa, Toxocara canis
MGHLADVLVEAGHDAVVLMPECDTRIKTSGTLRARTIRTSCNFDRLDDLLEPLDNMWSTNTRRMDFLFSRVENFVIFGITYVLTRFIAAPHALQPFEEHIRRPFTTVESIEILAKCPSIFINLNILLEYPREVNPKIVFVGGLTASRPSPLSEDFKRLMDESTGGVVLVSFGTVVFSSRMPPEVKSAFVSTFRHFPEITFIWKYEVDDEVAFDLPNVVKRKWVPQRDLLGHRNMRAFVSQCGANGMGEGIYGGVPVVCIPVFFDQMQNARKAEKQKMAVIIQKHNLTSQSLQSALMTVLYDKSYLDSARRISAMVRDSVIPVEEQISSRARITIKMKKVELLDPGSRRLNFLQFFLIDVISIPLILIFFLS

SEQ ID NO: 8660 - protein, 501 aa, Capitella teleta
MEVLRAVLCLLCVSMATTERILILNFPMKSHTSEMRMIGEELVRNGHEVYAVLPPSFPGIDDLKAKSTIRYLTYEMIVPDMYTAYDNVEVSPDWMEDLIRMTFLDDVSVYNVDPYFPIMAFCTNPLSDKKLYHQLEELRFDLALIDGFMEIRCLYILAYKLGIPYVSQSTQYEPWLQRNPALPSFVPWPIGTGDYGYTEKMTFWQRLYNTYSLVKFTAFPGVEYLSDDLVRKYAPEKPLVSIDQLAARSLLWLMDMDVLIDFARPMMPHMVEVGGLTTKPAKPLSADLEKFVAGAEHGVIVASFGSLGSNLPSRVNKRLMAAFSRVPQRVVWAFPHDAPEETPANVLVLRWIPQNDLLGHNNTKLFITHCGANGQFEALYNAVPMIAMPLFGDQPYNALRAEYNGIGLQMNILEFTPDDLTKAIDRVIHGDYGRQIQRLSDIFRSRPLTPVQRSAYWIEHILEYGGDHLKSYALEMPWYEYLMLDILLFVLGIALIAVTLL

SEQ ID NO: 8661 - protein, 268 aa, Priapulus caudatus
MPNVQHIGGHLCQPAKALPQKLEAMLETSYKKVVYVSFGTLMHGRKGVDENKRFMVALRGAVTNLPYFFMIAGFNMTSPPPNVVTLGWAPQNDLLAHSKVDAFFTHGGLNGLWQTICHGTPVVVMPLFADHFRNAHLAQERGIGEMIDFHTITTESLQSAFRRVVENDAYAARMRQLSKLYHHSLPMSPDETVSFWVNYTMLYADQQAPAYTELNFLQYWLIDVIACLLVIAAFFAWLTYVVLIASISISTRVIRRCCRRSIRNIITA

SEQ ID NO: 8662 - protein, 361 aa, Vigna angularis
MGNSEEKKHVAVFSFPFGSHPTPLLNLVLKLANAAPNLQFSFIGTEHSNKPLLISKPHIPDTIKFYSISDGVPEGHVPGGHPVERVNLFLQACPQNLQKGIDMAVAHTKERVTCVISDAFVAPSLTVAQRLNVPWVPVWPPLSCSLSAHFYTDLIRHTCNSAAGDTPLDFLPGLSKMRVEDLPEDVIQGVGEEETLFSKTLASLGSVLPQAEAVVVNFFEELDPPLLVNDMRSKFKYYLYVGFLTLSLPLPPLPPSDTDETGCLSWLDKQKGGSVAYVSFGTVVTPPPHEIVAVAEALEASGGVFTKDGLLKCLRLILVEEEGNLMKKNAVKVKRTVLDAAGAEGKAAQDFNTLVEVVSRS

SEQ ID NO: 8663 - protein, 533 aa, Plutella xylostella
MLAPLILLSAGVAALAGPAGAARVLGLFPHSGRSHQMVFEPLLRALAERGHHVTVVSFFPLDQPPANYTDVSLEGISPIGVETVNIEEFESLYSPYAWPRVLGVDRVLSQFLGFHPLAEMAVNICSKLVELPTLREALQKKYDVVLVENFSSDCMLGLLQAYGVQAPRVALLSSNLMPWSAERIGAAELPSYVPTVSTEFTDRMTFLQRMENAFVKLGLKQWFHYLIQEKEQELIEKSLGKKVDLQALAKNTSLMLVNTFHGLNGVRPAVPGLVEVGGMHLQRARKPIPPFMEKFLDESPEGVILFSWGSLIKTASIPPHREQVLVRVLSRLPQRVIWKYEGSAPEGNLTGNILRVNWIPQYELLLHKKVIAFIAHGGLLGMTEGISAGKPMLVVPFFGDQPCNGAAAEAVGLGTVLRYADLNEEAFGEAVRKVLSAPMRLSARQVSKIWRDRQTEPLETAVYWTERVARWGAASPLHSSARDLPFYELYLLDILAAALLAVVALLIVLRIMLKMLMYLLAALFVKQPKKKVH

SEQ ID NO: 8664 - protein, 527 aa, Caenorhabditis elegans
MRVLVFLLLFVLPAASCYKILVSVPKFGFSHMQTMGKLADILVEAGHDVTFLMPVDVPIPQNGTELAKVVLVPTTDAINEIMGHAMKSGAVANLWTHSANSKQGIMWSTDMIGQVSYHNTKNLIDNKALVQQMKDEKFDIGITELFDFSGLAFFEVIGLKNVMGAHTTSVFEGTLMATGAPILPSFVPASQTFTDDSGSILSRLNNLYMTYWSYQFQNKIQSFAQKALDEHYEKGKAPKIWNLVSDITWFFVNSDPIFDFPKPLPQNIVEIAGISVPEIKPVGKEWDEILSKRSKNVLVSFGSIASPTTMPEAVKKSIVDAFAAFPDVTFIWKYDDTESKLTAHLDNVHIVKWMPQNDLLADKRISMFWTHGGMGSLMESAQKSVPLVVVPIFGDQMRNAQIAKRHGVALIYDKMDLSNTKKLIGALKEVLENPEYKKSAELLARILATERFSPRQKIIDTVEMAGRFGQMPRWTSAGKEFSFLKYFNLDLVIIAVFIFFLSIVSTVLLIRHLLAKLGFSGDKEKSE

SEQ ID NO: 8665 - protein, 288 aa, Trichoplax adhaerens
MRKFNISTHLSGADLDYTPSLVLLPVDFALEYPRPVLPNVKIVGPLTPRPASPLPSDLEKFVNESPQVVLVSFGTILDSLSDEKIAILLEAFNKLPYKILWKSKNVDLKTGKNVKIVKWFPQNDLLGHNNVVAFVTHCGHNSMYEAAYHGVPVIGMPVFGDQPDNLQQLLRRGVAVGLNTGNLTVDGVINAIKTVVTDDRYSQKMKELSIAIKSRPRTPLQTAADWIDYVLISNGAKHLRVEKYNLNFIQYYLIDVCFVILSIIYIIFKIFQFTCRKCCRRQSKSKKD

SEQ ID NO: 8666 - protein, 489 aa, Lingula anatina
MEKIAILLRDHGHEITMLVADHYKPKHDLGDVKLIRFHIDDTEFNKGGVMDLQTAFDIIERDPVIVLKELDDLDYLLCHTLFSDNDILMQFRNSNFSLFLFDPLNIAAGTLLNEYLKVPSVGYWNQGFWNLWYVFHQPMFYSFMPNIPSGLSDHMNFWERLHNYEVDQSIRSWLEDKMDYIEGLRLKYLPKENIPHMKHAFERVSLMIAANAHFALDYPRPVMPHVKPISGLLWTPAKPLPKFFNDIVTDATHGVILLSFGTIVPHLEEEKAEMFARVFAKLSQKVIWRHDGKAPKSLGSNTYLVKWFPQNDLLAHQATKLFITHCGVSSMWEALYHAVPVVAIPLFWDQPQNARKLTDRVKVGVSLDYLTLTETKLENAIGKVLNEKSYRENAEKISIILQDTPMSGQEEFLFWLNYTMRHNGPLHFHSQAAYSLNWYQYFLLDVIAYKVAVSCLAISAYILLAVVLWKLMKTILKYFTSKNVKSKAA

SEQ ID NO: 8667 - protein, 502 aa, Toxocara canis
MSSALILSVIVILSSCCEGHKILVYSPKLFYSHFRFMGHIADILAAARHDVVVLMPECDERIKTNGTTLARPMRANCSFDGLSELLSTLDDIWIINTGRMDFLFSMAWALSSKENLICRGLLGDMELISRLRNEKFDLGISEAFSFCGFGVFDKIGLQKHLSAFNTQLIESMTEPYGINYNPSHVPALLSQSDDAMSFVERMQNFIVFGTTYVLTRFIAVPHALLSFEEYIRRPFTIAESIEILARCSSVFVNTNILLESPRELNSKIAFIGGITATQSSSLSEDFKHLMDVSSGGVVLVSFGTAALSSRMPTNLKYVFVSVFRRFPEITFIWKYELDDEVGSDLPNVIKRKWVPQAGLLFHKNMRAFVSQCGSNALSESVYAGVPIVCIPIFIDQMRNARKLEKQHSALVIHNRNFTAQSLEVALRGVLYDKSYSISARRVSAMVRDAIIPLEEQISGRARIAIKMKKVELLDAGYRKLNCLKFFYIDVICIPLILIILLS

SEQ ID NO: 8668 - protein, 515 aa, Plutella xylostella
MILRFCFIVISLALCLSVPSESARILAVFPTPSISHQVAFRPLTQELAKRGHQVTVLTTDPAFKKGQQPANLTEVDLHDVSYTAWAEHFMKVVNGDSGNSKNIMLTIFKSLNLVFELQLHMKEVQEVLNSKQQFDLILIEACVRQALVFSHVFKAPVIQVSSLGAVPPNYQVLGAPSHPILYPELTRQRLFDLSIVEKIQEIYHDMWIRYLLWSLEDSENKMLKKVFGPNTPSVSQLYENVDMLFLNINPVWDNNRAVPPGVIFMGGIHQKPHKDIPPSDLKTYLDGSKQGVIYMSFGTNVNPSQLPADRIALFNKVFSKLPYDVVWKWDKDSMPGKADNVKIVKWVPQSDLLRHPKVKLFITQAGLQSTDEAISAGMPLIAFPMLGDQWYNAEQYVKHKIGLKLDIAEITGELLEQSIKQVIHDKSYRDNIRALHTAMTDQPQSPLDRAVWWAEYVIRHKGAKHLRSAAANIPWSEYLMLDVVAVLLSAVVGVLAVVYWVVRCLFKQTGKVKKA

SEQ ID NO: 8669 - protein, 544 aa, Caenorhabditis remanei
MRAPLLLLLLFATSSLCFKILVSVPKFGYSHMKTMGKLADILVESGHDVTFLMPVDVPIPQNGTELTKVVLVPPTDEVSQIMETSMKSGAVANLWTHSANSKQGIMWSTDMIGAVSYHNTKSMINNKALVQQMKDEKFDIGITELFDFSGLAFFEVIGLKNVIGAHTTSVFEGTLMATGSPILPSFVPGSQTFTDDSGSILSRLNNLYMTYWSYEFQNKIQGFAQKALDEHYGKAKSPKIWVGVFVLILAYLSSNLFQNLVKDITWFFVNSDPIFDFPKPLPPNIIEIAGISVSKIHPLDKEWDEILNKRSKNVLVCFGSIASPTTMPESVKKSIVDTFAAFPDVTFIWKYEDTESGLTAHLNNVHIVKWMPQNDLLADKRVSLFWTHGGMASLMESAQKGVPLIVVPIFGDQMRNAQIAKRHGGAVIYDKMELGNSKKLIGVLKEVLENPEYKKSADLLAQILATDRVSPKQKIIDTIELAGRFGQMPRWTSAGKEFSMLKYFNLDLVLLFIFIVFSVVLSVVLLIRRVLVKLGFSGKKEKSE

SEQ ID NO: 8670 - protein, 272 aa, Citrus unshiu
MSEAAGSTQRRHVAILAFPFGTHAAPLLDLVRRLSEAALEEEVTFSFFSTAQSNGSLFMEKDELRDCKIVPYNVESGLPEGFRFTGNPREPVEHFLKATPRNFVRALEKAVAKTGLEISCLITDAFLWFAGEMAEEMRVPWIAYWTAGPRSLLAHLDSDIIREIIGVNGPENQTLESIPGFSSIRAKDLPEGIISGPLDSPFPIMLDKMGKTLPKATVVAINSYEELDPIVVETTPKSKIPKISPTLANFHLNISPPKFLILMAACHWLNGT

SEQ ID NO: 8671 - protein, 315 aa, Medicago truncatula
MEIQWFIRSLSSQLGQNWKRRGCHEVLLSLLHFSSVPNFARSSLSSLSCFSGRNFSRFTRTKHTLRDNSHHKISSTEGVNNNDKQLHVIMFPFLVFGHISPFVQLSNKLFSHGVRVTFLSASSNIPRIKTTFLSDDQINELALGLELTGLPFTLGLNFPSNLCAKTELERALPKGFLERVKDRGMVHTGWLQQQLILKHNSVGCYVCHGGFSSVIEAMVNDCQLVLLPFKGDQFFNSKLIANDLEAGIEVNRKDQDGYFHKEDILKAVKTIMVNDEKEPGKSIRENHMKWRKFMLDKENQNKFIIDLVSQLKSLA

SEQ ID NO: 8672 - protein, 526 aa, Drosophila erecta
MLSGPGIAGVLLTILLLGLLCPKLTNAENILAVFSYTFGSSYLLITPYLRNLIQRGHQVTLISAVTIMPHIEGVHHIRVPRLDMLMEALLEYEYDAHLTKWTEAQFVSEYFYNCSKFVLEDPGVQQLLHNASAQYSMIILEAAHNDALFGFSQHFDAPLVGIAAYGSSWNIDFLVGNSAPSVYEPMSALGYSPGHSLMEKWHNLIFITEERLVERFIYLPRQIDLYRQHFPGVTASIHDLRRRFSLILINQHFSMGRVRSNVPNIVEVAGMHLEETSHPLDAELQKILDEAEHGVIYFSMGLQVVDNWLPPGLRATMSDVFAQLKLQVIWKSDHPAMVNQSRNVFSRTWLPQREILNHPNVKLFITHAGLLSLIEAVHYAVPLLCIPLFYDQFQNTKRMEKLGVARTLDHKNLSRDEIVLIIEDLVHNASYKENARDLSKRFHDQPMSAMNTAIWWTEYILRHKGADHMRIAEQEMSFMQYYNVDVVSVLFGRIGLSVIIVIFLGWKLVLLARRNLEFRFNVPMVR

SEQ ID NO: 8673 - protein, 539 aa, Drosophila guanche
MDIKRNSPKWRRTTMAFLVVVVVVLLLPASSEAAEILGLFAHPGKSHFEFFRPIFRELAGRGHNISMYSYFPLEQPLANYTDYVFKGSPLLTDVIDLMKFKTTERTLLGLPYKIPTYFMLHSWGMRFCQSALNSPLIADLLSSPLRYDLIILEHFANDCMTAVAHLLNAPVVALSTCAIMPWHYQRMGTPHINAIMPMNFLTYSDEMGLIDRLNNFIHFHTVNTLYEWITQPATDALISQRFGFGLPSVNEIVKNTSLMLINQHYALTGISPYAPNVVEVGGLQIGPQKPLPEHLEKLMEDSLSGVIYISWGSMVDPTTLPIEKRRALFKSIAHMKDYTFLIRWKSDKPLAQDKPSNLFTFDWLPQRDLLCHPRVKAFISHAGLLGTTEAVHCGVPMLVTPFFGDQFLNAGALAQRGFGVIVHFGDFDEQHITSGLQKILEKEFADKVRRSAKAFRERPQSPLELATWWIEHVIDTRGAPMLENRARHINWFVYNSIDVYLCCLAIIGLPLFAIWQLVRLLRLTLGLMNATKNQKTKVQ

SEQ ID NO: 8674 - protein, 638 aa, Gregarina niphandrodes
MAGTGDFAMGAVLQVSGTCEIKFINSTVHISHGGPATDTVVAKPTGNKGTDESAVAATELAAKSAVVAESEIMAGANKEDSIASELEVAVLCFHGFGHIAPSLHLSERLCQLHKGCSVTLFGVVSSTQQLGAIKNLIAENPRVRVYAIVAQDDEDSFSIYAQDVKNGRWVARVKKFYDSGLMDLRAVIVDSTGCHSAGSPACESDGKPPGEEKNPVDKSSWAAVVITTPIRRPKVVVPDMFVGYDTEVARHFGIPSWQFHASSLAFVSVADPHAETTIPGVGVVEPIETSPAHVDKFKGLLDAENLARRYREGILVNDVADWWPHEAVEMARQRVTRAEDGRNWQVLCVGPLYKCREQAAQQLGRIQTTEPNHSVEPRQATQTNPAVANTPNQTLPRQSTPNGTTTLEQSTPDQTEQTELSGGAKTELSAQENKEVRNHFDSQRGCRCDSQTQTDEDLGDLTPEESPASADTAEAWLNKQRPRSVIFVSMGSQFDLRAADLLELASALEEMNVPVLWALRLPKQNNIMVTALKSEDAQKMSEDAQKMSEDAHKSGDIESWLPENYINRNCGKIKIISWVDQVAVLKHKAVRVFLSHSGWNGTLEAMSSFEGPIVCLPLGAEQAMNAKIQEEYFKNGLR

SEQ ID NO: 8675 - protein, 514 aa, Toxocara canis
MLSVLILIATVLLSSCCEGHKILVYSPKLLYGHVSFMGHVADVLVEAGHNVVTPFLKDFTLRLPSSPEATNFETALPGLKFLLSLVDRCERFSYASDEICPFFRLKKDIQSNGPYQNSKELQTRNWGALLGDVELIRRLREEKFDLGISEAFSFCGFGIFEKIGLQKYLSAFSSEFIETLTEPYGISYNPSHVPGEDLTLLSRSSDIMSFIERVENFVIFGITYVLTRFIAAPHALQPFEEHIRRPFTTVESIEILAKCPSIFINLNILLEYPREVNPKIVFVGGLTASRPSPLSEDFKRLMDESTGGVVLVSFGTVVLSSRMPPEVKSAFVSTFRHFPEITFVWKYEVDDEVASDLPNVVKRKWVPQGDLLGHKNMVAFVSHCGTNGLGESVNAAVPMVCIPVFFDQMHSAKKLEKQHTAFIIHKHNLTAQSLQWAFRTILYDKSYSVSARRISAMVRDAVIPIEEQISRRARIAIKMEEVEMVNPGSGRLNYLKFFFIDVISIPLILIIFLS

SEQ ID NO: 8676 - protein, 1011 aa, Haemonchus contortus
MYNILLLCYITTCTYCANILVWNPTIGYSHVRFLGSIADILHQDGHNVTIISPIVDPRVDMIGHKYAISQIPYESKYMDQAEDYSKMGIKTSSFWESPVEQGFSLSRSDFEGFVKNTQNMYRGLAEDKVFLARLRDCNFDIAVHEIYDPYQVGVFELIGVKKTVAVSAIGITPYVREVTGVSTNPSYIPGSYTTYGDEMSFWERLDNFKLEIELSYRSYIWERKVWSYFNAVYPGFPDFKELLKQKVGVVLLNVNEFIESPRPTANIVRYIAGISIPEPKPLDKELSALLDKRSSNVLFSFGTFTQAKNMPLWLKKDIVEAFASFPNTTFIWKYEDESETEVFGAHPNIHRMKWLPQKDLLADKRLSLFITHAGMNSIIEATFAGKPMVAIPLFGDQFLNAKNLRRRGLAIMIERNKLTRDTLVAAIREALSPESSYAHKAAVVAQQLHGRAAAAREELSRWVNLVAEEGQMDHLLLRMLLLVLLLTSVPFISCLNVLIWSPTVGQSHVRFLGNIADILADDGHNVTIVSPVLDLDVRAHTHNPAVLHLSYHSKYMRPNEDDDFSKLSIKGTSLWDAETLEGRSCTTQDMALFVELLKNIYRGILEDEEFLNRLRNSRFDVALHELYEPFSVGIFELIGVTKTVALSAFGVSLYVPEITGVPANPSFVPGAFSTYSDSMTFWERLNNFIYEFELDIRYRIWERQLWLHFNEVYPGFPTFRELLKKQVGVVLLNINEYTETPRPTANIVRYIGGIAIHPPKPLSQVDKRLDAILNERSTNVFLSFGTISQSKDLPLILKKDIISAFSAFPNTTFVWKYEDENDIHLFKNHTNIHTMKWIPQSDLLGDKRLSAFITHAGMNSVLEATFSGKPMVVVPLFGDQYLNAKNMERRGTAVMIDKRDLNKGTLTAAIREVLSPNATYAHKAATVARSLEGRVAAARADLLYWVKLVAEEGQMDHLMMRARDLSFIQYHCLDIIAYLLAQFVVTLIFVFFVVRLLVRRVSVVFKKRKTE

SEQ ID NO: 8677 - protein, 519 aa, Drosophila busckii
ISASCKMLLLYCLIIHLAQTSGLNVLGLFPHPAVSHFQFFQPIMRRLAELGHKVDVLSPFKDANPLPGYKDYALSSASFSNAMSFDLFEQRSLPFLLPFEEFFILHKYGKQACNTTLRSSALEQLLKQPAGHYDVILLEQFNTDCMMGVAHQLKAPVVALSSSALMPWHYERMGAPQIPSYISALFLGQQQPMDFGGRLTNWLTIHSLNWLYSLFSVPSADAFLRQRFGPGMPSTAKLVRNTSIMLVNQHYALSGARPLPPNVIEVGGLHLKQPRPLSAKLQQILDQAPHGVILISWGSQLRASSLSSRKLDGLLLALSRLPQQIILKWEEHTLPHCPSNVHVMKWLPQRDLLAHPNVRLFFTHGGLMGITEAVASGVPIVGMPIYGDQFLNVAQLMAHGSSVKLEFQQLSEQTVYAALSQALDPSYKLNAQRLAQAYNARLEQPLDSVVWWVQHVADTKGAPLLQPCAVKLNWIIYHSLDVYLAITGALLLLLLISSKLWRRCHAPKATASKPKSKRN

SEQ ID NO: 8678 - protein, 461 aa, Temnothorax curvispinosus
MLSRVIFLLICCILMGDIVIASKPLSILVVETVPSPSHHVWTEHLVKGLLRKGHHVHAVSILETKVKGKLAQNLTYAIAKGKPPIVGYVPFGAIPYLKDYIGGPSYPTVRSYTHAAIAKPEGLWLRTWNTLYYIVDDLIRHYYFFPIIQRLTEEYVGHAIRPLHKIERESINIVLINSHSALESAIPLPPNTLEIAGLNAQAVQPIAGEVIVMYSEDVRIFLDGAKDGAIVISLGTNVKWKHFNLDTVKTVILALSKLKQRVLWKLDIEVPFEISENIMVMKWMPQSEVLSHKNVRAIWTHGGLLSAQEAIWKGIPMIVMPFFGDQKSNTRILVAKGVGIYLDIKTLSTQSILHAVEEVLYNESYTRNMKQLSSEFRDRPIPPLDLAVWSVEYTVRHPNGTLVTPLRSQSWVEQNLIDVYALLFLSFFIILLSIFFVIKLLINFYYNYMYTASNLRKSKQA

SEQ ID NO: 8679 - protein, 525 aa, Bombyx mori
MRAHIACIVLIAHAVASAKILGLFPHTGKSHQMVFDPLLRRLAEKGHHVTVVSFFPVKNPPANYTNISLESLAKLGVETIDLSWYESSNSILKMTGPEKIYEELTAMQPLSYMAVDVCSKLVGFEPLARTLRQDYDVILVENFNSDCMLGLAHIYGQKAPIIALLSSSLMDWSPSRIGVSDNPSYVPIVTSTFTTPMSFVQRLKNTVLNIYYKLWFRYAIQLKEKEIIENHYGRKIVDLEELARNTTLMFVNVHHSFNGVRPLLPGIVEVGGMHLDHKRKPIPEFFERFLNDSEHGVVLFSFGSLIKTSTLPKYKEDIIMKTLSQLKQRVIWKYEDSAEEGTLVGNVLKVKWIPQYDLLQHSKIIAFVGHGGLLGMTESISAGKPMLVIPFFGDQHLNGAQAEKIGFGKVVSYADLSEKTFLDGLQSVLSPEMRLSARRASNIWSDRQADPLDTAVYWTERVIRWGHRAPLHSPARDLPLHQYLLLDVAAAILVAILVLIAILRLIVVLIIRFFSGSVTAKEKLH

SEQ ID NO: 8680 - protein, 532 aa, Lingula anatina
MYQVIDRLGLSLFLGLLCLTTSCHGDKILMLPYGATHTSRAMNMEKLALMLTEHGHNVTMIVRADYTPWRPLPGVVLETYNVTVNDGSQLPRKLDFKTMMRLVKSDIFTLIHIESESNRETCKHMLSDKQLMSKIKRGTFSLFIFDYLELCSAILLYQLKLPSVMYSNYGLTGLWIANQNPLNPATTLMEGADFTNNMNYIERFRNTMLWIAANAFYNYYYIRDIENLLSTFLPDYNFPPIHRCFENVSIIIAANTHFALDFPRPVMPHIKPISGLQWTPPRPLSSDLLSFMSSAHHGVILMSFGSMMPTLEEETAELFAKVFSKFPQKVLWRYKGPVPPSLGENTKIMEWIPQNDILAHPAMKLFITHCGISSTWETLFHAVPVVAVPLFADQHHNAAKLVKRAKIGVLIDFHTMTQIELEEAINEVLTNEKYKQKAAKMSEILQDVPISGKDEFLFWIDYVIRHRGPLFLHNEAVFKLSWYQYYLLDIILPFVAAFLCFTFLLKVFAVCMFKAAVRVIRLLLKRVKLKRS

SEQ ID NO: 8681 - protein, 510 aa, Acropora digitifera
MMTVLVVSLLLLAANSALSARIAGFHMAGGSQYLNTKLVLEELASRGHEVIMITPSSQKAKSSAKVPHAFYQVPYKQGFIEDTVLRLQLEGRHFQSFSQMPYLLLNICEGALNSTKVANELKGVDLMVHDSLSVCAVLLGERSDIPRVEIVVVPPSSPVGFIHMIPMPVSYVPQLLSGLTDKMTFFERVLNLGAYLSLLTVINLGIGRPFNQLKVKYNIKPERSFQTAITDAELCLITADFALEYPQPLLPDQIMIGPLNVKDPKPLPADIEAFVSESGPHGFVIVSFGSNVASILPREVVDVLANAFGELKQRVIWRLQGYIPSHLNSNIKVVDWLPQSDLLAHKNIRAFVSHVGHNSLYEAAYHGVPVVAVPLFGDQPANAKKVERRGFGVAVDYRNTDARKVFETIDKVVTEPSFKEKAMHISRLMKDRRRTPLEEAGDWIEYVFRHGGAQHLRAQVFNIPWYQYYLLDVIAFLVATVIFVVMVIQMTYGCLCRFCCKKSREKPKNE

SEQ ID NO: 8682 - protein, 224 aa, Citrus unshiu
MLDFGFRYLYGDISRAVGRFLQFHLRTATSVQEATQSSSEQHVAVLAFRFGSHGLTIFNLMLKLASAAPNLKFSFFSTKKSNDSFLSASKARLPDNIRVYDIEDGVPMKYASTESNPLEAVELFVKATPENFKKGLDAAVSKTGRKISCMLTDAFLTFSGEMARDMHIPWFPVFVAMPYNGSAHIHTDLIHQFFINSSGSLRLEDQTLDIIPGLSMMRISDLSD

SEQ ID NO: 8683 - protein, 541 aa, Drosophila mojavensis
MSWRVFCRMSWLWCWLLAGLTLCHAGSGSNILMITMGGTKSHKIPFWALGRALVKRGHRITFVNGFQADFHVDGLEEVTPQRLVQYIANYTDWDLVGARYSGHAPLSMADAMRYPIEACNSLLNDPATQRLLGNGTWPGHAQYQLAIVDGAYPECALGIVHRLNVTAFIYINTVAFYTGSVSLAGNPVAYAVTPHVFGTWTLPMDFLQRVANCLTHVIADLLHWLCMQRVHRLLRHHLGEDVPHPYVLGRDVSFILQNSHPSVRYPSAHLPNVAEVACLHCRRAAVNLSQLDVELSGFMEAAPDGVIYLSMGSSVRSARLPAKLCELFVAVFARLPQQHVLWTWAGNASEQLPQLPANVLVRPWLPQQDILGHRRLRLFITHGGLLSQHEAVFHGVPLLVLPVFCDHDANAAQAQRHGYARQLQLAHLDEEALYCAIYDVLHNDGYRRAVRQRRALIHDQLATPVRQAVYWTEYVMRHKGAKHLQHPGRHMSFCSYHSLDVLCLLVVMLLLVVQALRRLHKYLAGSIEAEKRNNGKNSLKI

SEQ ID NO: 8684 - protein, 539 aa, Drosophila pseudoobscura
MDRKRNSAMFRWRRTTMAFLGVLLLMPAIPSEAAEILGLFAHPGKSHFEFFRPIFMDLARRGHNISMYSYFPLDQPMANYTDYTFKGSPLLTDVIDLMEFEKTEWKPWGLPYKIPTYFMLHNWGMRFCDAALNSSLIADLLSSPLRYDLIILEHFANDCMTAVAHLLNAPVIALSSCAIMPWHYKRMGTPHINPIMPMNFLTYTDEMGLVDRLNNFIHFHTVNILYEWITQPATDELISQRFGFGLPPVNEIVKNTSLMLINQHYALTGLRPYAPNVVEVGGLHIGPKKPLTPVLNKIMEDSLSGVIYISWGSMVDPSSLPDQKRRALFKSIAHMKDYTFLMRWKSGKPLPHDKPGNLFTFDWLPQRDLLCHPRVKAFISHAGLLGTTEAVHCGVPMLVTPFYGDQFLNAGTLAQRGFGVIVDFGDFDEHHITRGLQTILDKGFSDNVRRSARAFRERPQSPLELAIWWIEHVIDTRGGLLLEGRARHISWFVYNSIDVYLICLAIIAIPLITIWQLVRLLRRTLGVLKVVKNKKTKVQ

SEQ ID NO: 8685 - protein, 507 aa, Trichoplusia ni
MKFNKLLLLALSAMVNGVLTLNILAVFPYQGKSHFFVFHSYLKELARRGHNLTVISYFPQEKPIENYHDISLAGKAKILEDVFPIYRSYWGMIQVSLFVTNSGTENCKVLLADENVQNLWKNKVKFDLVVVEMFNSDCTLGLAHALGAPVVGLTSCNLMPWHYKPFGIQYNPAYVSFMFSEGGTKPTLYQRIERTIFQTYLTTLYKYNSQRVDQRTLAQYFDNVPPLEELSRDIKFVLLYSHFVLTGPNLYPPNVQEVGGYHVAEAKPLREDLKKFIEESEHGVIYISFGSMLRATSTPKDKLEAIIGAISELPQRVIWKWEEKTLPGNPKNIFLSNWLPQNDILAHPKVLAFYSHCGMLGTTEAMYHGVPMVGMPVFGDQPLNAAAVEESGLGVQIQVKDLTKESLLEKFRTVLDPAFRSKVKELSKLWKDRPQSAMDSAIYWTEFAARSKKYTFRSPASTVPLYQYLYLDVFAVLGGLLFVIINILKTIIPMLFQNSQKTKLKSK

SEQ ID NO: 8686 - protein, 536 aa, Lingula anatina
MEKALRLRMVLFVLIFLTSIHNIAEGATFVGICMPVKSQIIELDTLLVGLADKGHEVYLVMGEHPSVPPLPKNVIDSKVKLLTFKVRSPDFMDFEKPEVQKNGVFAFFDNPRERYIPIKGVAFVNNWTKILHGYFGDLLTDEDFDRKMTKLKPDMIIVNNAFAFAPTAYLFPYKYKIPYVTSAVLGPPESGVPQQASFLPSPITKYSDQMTFLQRTVNFMTHRFISIMTTHKISPDYYAKYLPNVIQKPFHQLVADSELFIITSKHPSIDYPQLALPNTIFAGGMMTRPGKPLPNELQNFMDGHKNGVVVVTFGSLAMYIPDQVIQKLLSAFSKIKYGVIWRYTGSKKLNLPSHVKVLPWLPQNDLLAHPNTKLFVSHCGNGGSYEALYHGIPVLGFPLMGDQFYNGYRGQHRGVAMVMDILYFTPEDLIENINTMIENSSYYTKAKKLSAIYRDQPWTPQQQAAYWIEHVLKHGGSYLRSPSAHMSWYQYYSVDVVVFLLSSFICIMVVCISCCKCLCRRCCKGKGSKQNKLKTR

SEQ ID NO: 8687 - protein, 508 aa, Spodoptera exigua
MKFNSIIVLFSALFSEVLSLNILGVFPYQGKSHFFVFAPYLKEIARRGHNLTVISYFPLKEPVDNYHDISLAGKTKILEDVFPIYRSYWSIIQISFFLTNSGQENCITLLDDENVQNLWKTKQKFDLVLVELFNSDCALGLAHKLGAPVVGLTSHVLMPWHYEDYGIHYNPSYVPVLFLEGGTKPTLYQRIERSIFHLYFVYLHKLTCRRNNQKTLAQYFDDLPPLDDLAKNVNMLLLYTNYVLSGPGLYPPNVREVRGYHVTKPKELPQGLKKFIEESEHGVIYISFGSMLRATSTPRDKLEAIIDAVSEIPQRIIWKWEEKTLPGNPKNIFISNWLPQNEILAHPKVLAFYSHCGMLGTTEAIHYGVPIIAMPVFGDQPSNAAAVEESGLGVQIQIKELTKETLLEKLRIVLNPEFRKRAKELSKVWHDRPQSPMDTAIYWTEYAARTANYTFRTPANSVPLYQYRMWDIMAVILTILFIIFYSIKTVISLVQKRREERFYEFKTK

SEQ ID NO: 8688 - protein, 536 aa, Salmo salar
MTVMGSCVALVPVLLLLSSLQPSSEAGRVLVYPVDGSHWLNMRILVEALHTQGHQVTVLRSSTSWYVAEHSPHYTSITVPQAQPQNIESQEFMAHFLKKSLEIQRGKGSPWAFLQFCGNLFSMLRQNQEMVAELVVTMFENQTLMRDLKEAEYDLVLTDPVFPAGVLVAHYLQLPLVLNVRWVLSGEGHFAIAPSPLSYVPQVFSRNSDQMNFAQRLNNIFYHCLSYYMYRYVSNPPYQAVCDRYFAPDEVDVISLIQGADLWLMRVDFVFEFPRPTMPNVVYTGGFQCKPSKPLPAALEEFVQSSGEHGVVVMSLGTLLGGLGPEMTEVIASAFARLPQKVVWRHLGESPLSLGNNTLLVKWLPQNDLLGHPKTKVFVTHGGTNGIYEAIYHGVPVLGIPLIFDQFDNMVRMKARGVAEVMEVTTLEVESLTQTLMDILDEEKPYRENMRRLSRLHHDRPIEPLDSAIFWLEFVMRHKGAAHLRSESYKMPWYVYHNVDVLALLLGSALLVLVLFVVSCMCLVRGLQKRRKSKLE

SEQ ID NO: 8689 - protein, 370 aa, Phreatobacter stygius
MKIAQIAPLCERVPPRFYGGTERIVSYLTEELVRQGHDVTLFASGDSVTSANLVRCSDMALRLNPSVKDYLPYHVIMLDEVARRADEFDVLHFHIDILQFPLIRGLADRTVTTLHGRLDLPDMKPFYAAFPEVPLVSISQHQREPMPPALNWVGMVHHGLPPDLLTFNPTPSGDYLAFLGRISPEKRPDRAIEIALAAGVPLKIAAKVDKVDQVYWETVIEPMVTAHPSIDYIGEISEQEKAEFLGNARALLFPIDWPEPFGLAMIEAMACGTPVIAFRSGSVPEVVDHGRSGFIVDTIVEAAEAVPLASTLSRAGVRATFEARFTAARMAADYVDIYRALPGVRAEAARFRRRNGDGAGLHLVGSGALA

SEQ ID NO: 8690 - protein, 353 aa, Bradyrhizobium sp.
MRIAQLAPLAESVPPKLYGGTERVVAWLVDELVKLGHDVTLFASGDSRTTGKLHAVWPRALRLGRKGADPSAACAMLMEAIAKRARDFDVIHAHVDWLHLPLLSRLGVPFLTTLHGRLDLPGLPDVVRQFPDASFVSISDRQRLPLPDAKWSGTIQHGLPSELLRPFHEEGSYLAFLGRLTADKGPEDAIRIARAARMPLRIAAKIPRAETAYFKKHLEPQIDGETIQLVGEIDDVKKQPFLGGAAALLFPIDWPEPFGLAMIEAMACGTPVIAYRSGSVPEVIEHGLTGFIVENEEQAVEAVGRLRKLDRRRVRARFEQRFTARRMARQYEGRYRELVGAAAGKFDTERLEI

SEQ ID NO: 8691 - protein, 229 aa, Mesorhizobium sp.
VPTQRTGGWPMPPVRWVGTVYHGLPRYLLRFRPKASGYLAFLGRISPEKGPETAIEIAARTGMPLKIAAKIDKVDQSYWKERVEPQVLRNSNVEFIGEIDERQKADFLGNAAALLFPIDWPEPFGLVTIEAMACGTPVIAFRRGAVPEVIDDGVSGLIVETVDEAVDAVRRINGLDRAQVRRTFEERFTVERMCRDYVAIYGSLSEDITEALGSQNERAKNAAMMTMST

SEQ ID NO: 8692 - protein, 372 aa, Unknown
  Description of Unknown: Chloroflexi bacterium sequence
MSRSSSLRIAMLAPPMLPVPPPTYAGTERVVAALIDELVARGHRITLFGPGDSTVNCAIVPTPERSLWSTGYRGDVATYINITLARAWARAEEFDLLHSHVETLGFLFARYCPKPVLTTLHGRLDVSGVPRLLEEFKDIPLVAISDSQGRWWPDLNWIATIHHGLPLEGMPHSDEPGNYLAFIGRVTPEKGVADCIELARRTGLPLRMAAKVYDPHEKRHFEEIVQPAIDDGVVQFLGELAEPERDALYAGALATLMLGAWPEPFGLVAIESMAAGTPVIARRAGGPTETIEHGVDGFLVDDLTEAELAVSRVRALKRARIRKRAVARFSPARMADAYEAAYAFLLTGDGARRRGRAEEVRDGVPDKVSAKV

SEQ ID NO: 8693 - protein, 364 aa, Unknown
  Description of Unknown: unclassified Methylobacterium sequence
MKIAVLAHLKYPIGQPYAGGLEMHTHLLTVALKRHGHDVTLFASRGSDPALDPVMLCDPTGDALLDPEREEAIDREEEDAYRRMMEMVAAGGFDLVHNNALHALPLRESARLGLPWVTVLHTPPFDSLVGGVVQADPDMAFLAVSPSLAQEWAHLVPGAQVVDNGVDLSTFAFSHAADDTPFAFWSGRIVPEKGLHLAIDAARAAGLPLTFAGPKLNPGYWAAEIAPRLGPDLTHLGHLSHRDLAHHLGRARVAIVSPRWEEPFGLVVAEALACGTPVAAFRRGAMPDILDASCGRLARPDDPQDLSVAIREAAGLSRRACRDRAEALYDAAAMTGRYLEAYDAVIARCAERARPALRVAGGRG

SEQ ID NO: 8694 - protein, 359 aa, Arthrospira maxima
MPQKSWKLLFISTPVGPLGSGLGGGVELTLLNMAKALHSRGHDITVVAPSGSVLESLSVIEISGKLQPIAQNQDRDSLITIPENSVLGNMWEYGRQVQTNYHAIVNFAFDWLPFYLTPFFPTPIAHWVSMGSLISALDQIVVEVMKQFPGTVGFYSHTQAATFGSDLGYACLGSGLEMDRYQFCDQPHQQLAWMGRISPEKGLEDAIAAADKTGIPLAIFGKIQDEQYWQNILNTYPNAPLNYRGFLNTDELQQGLRECRGLLMTHRWVEAFGNVAIEALACGVPVISYRRGGPAEIVRDGETGWLVEPDSVTGLVDAIAKLEQIDRRQCRALAEKEYSLVALGDRLETWLSDVIALKN

SEQ ID NO: 8695 - protein, 333 aa, Unknown
  Description of Unknown: Actinobacteria bacterium sequence
MRIALLGPVAWRTPPRHYGPWERITGLLAEGLVARGVDVTLFATLDSVTAARLDGVCPHGYAEDPTMDGRVWEAMHIAHAFTRSVEFDLVHSHLDWLPLAFAGQCRAPLLTTIHGFSGAGILPAYARAASNYVSISDADRSPDLEYVATVHHGIDVAELPFTADAGTGLVAFGRIHPDKGTHTAIEIARLAGRRLTICGIVQDQRYFTEQVAPHIDGDRVVFLGSVGPERRAEVLGSSAALLHPIAFDEPFGLSVVEAMACGTPVVAYPRGSMPEVIDEGVTGFLVPDAEQASAAVKNIAAIDRAGCRTRARQRFSVDRMVADYLHVYATLLG

SEQ ID NO: 8696 - protein, 356 aa, Bradyrhizobium sp.
MRIAQVAPLTEAVPPKLYGGTERVVHWLTEELVTLGHDVTLFASGDSQTSGKLEATWPKALRLDGSVRDPNALHMVLLERVRQKCDQEEFDFLHFHLDYYPWSLFQRQPTPFVTTLHGRLDLPEHQPVFDTFPEVPVISISNAQRRPVPQANWVRTIHHGLPENLLTPQAVNPSYLAVLGRIAPEKGVDSAIKIAMRCGIPLKMAAKVDRADQEYYEAVIRPLIVDNPLVDFIGEISDREKPEFLSGAIALLLPIDWPEPFGLVMIEAMACGTPVIAFNRGSVPEIIEDGLTGFIVEDETSAVGAVGRLPALSRQTIRKRFETRFTARRMALDYLNCYRDLMEAAEPRIKLVASAE

SEQ ID NO: 8697 - protein, 331 aa, Unknown
  Description of Unknown: Alphaproteobacteria bacterium sequence
MRLDGSVRDPNALHMAVLEQVRQRAHDYDLLHFHLDYYPFSLFSRQSTPFVTTLHGRLDLPEHQVVFATFPSIPVISISDAQRRPVSRAGWIRTIHHGLPERLLTPQPITPTYFAFLGRISPEKAVDQAIWIAKRSGIPLKIAAKVDAVDRDYFESEIRKLLAPPDVEYIGEISDGEKSSFLSGAIALLAPIAWPEPFGLVLIEAMACGTPVIAFNRGSVPEIVEDGLTGFIVERKEEAIAATDQLSWLSRGAIRRRFEERFTARRMAREYLAVYRSLIDKRRPRRSTHHAGEFLAPSIAGAFAEKAALKKSRRSGTKVAFNGEVTRQRNQ

SEQ ID NO: 8698 - protein, 418 aa, Ktedonosporobacter rubrisoli
MKIAHIASSWIALPPQNYGGTEHVLAYLLEEQVAQGHDVTVFAPADAHTSARQVSFFPRSLLSSGTPWLAHLKAYYHLHKAVSLLSRLQAEIVHLHLSSPSDMYLFPLLASLSIPRLMTLHSCFPFDRIDSWVGDADDYYLHEWANSMPMVAISEQARRCAPAGLNFLGVVHHGLPMSRFPFSAQPPANYLAWLGRIAPAKGPHLAIEAARRAGIRLLLAGRVSQHIQEERRYFEEKIRPQLDGGQIRYLGPVDMAAKVELLGRARALLNPIEWEEPFGMVMIEAMALGCPVISFSRGSAPELVASGCNGFLVENVEQMAQAIGMLGQVDRRQVRRYAEEHFSVQVMASKYLSLYRQVLAEQGPNSLQNLLPASHIFTEPLMLPSRLSYQPSSQEPGASTGAISQTEKQQVQWLDNLA

SEQ ID NO: 8699 - protein, 356 aa, Unknown
  Description of Unknown: Alphaproteobacteria bacterium sequence
MRIAQVAPLTEAVPPRLYGGTERVVHWLTEELVALGNDVTLFASGDSRTSAKLDATWPKALRLDGAVKDPNALHIVMLERVRQKCDDEQFDFLHFHLDYYPFSLFSRQPTPFVTTLHGRLDLPEHQPVFTTFSSVPVISISDAQRRPVPHGNWIRTIHHGLPENLLTPQPVRPGYLAVLGRIAPEKGVDRAIRVAARCGIPLKIAAKVDRADQDYYDEMIRPMIEGSALFEYVGEINDSEKPDFLSGALALLVPIDWPEPFGLVMIEAMACGTPVIAYNRGSVPEIVENGLTGFVVENENGAVAAVDRLSHLSRHAVRQRFESHFTARRMALDYLAVYRSLMEAAEPPMKLVSSAE

SEQ ID NO: 8700 - protein, 364 aa, Rhizobium sp.
MKIAQIAPLAESVPPKLYGGTERIVSYLTEELVAQGHEVTLFASGDSVTRATLVSCADVALRLNPAVREHLPHQVVMLEEIRQRAHEFDVLHFHIDLLHFPLIRDFADRTVTTLHGRLDLPDLKPFYTTFPDIPLVSISNDQRRPMPPVDWRGTVYHGLPADLLPFTERPKGNYLAFLGRISPEKRPDRAIQIAAKVGMPLKIAAKIDNADKAYWENVIEPMIKSHSHVEFIGEINELEKADFLGNAGALLFPIDWPEPFGLVMIEAMACGTPVIAFGCGSVPEVIENGVSGILVDSVTEAAENVEWALRLDRRKVRAAFEKRFTAQRMAWDYLDIYRNLPGVRTKAAPIRRSNGQALDLQAVA

SEQ ID NO: 8701 - protein, 384 aa, Mesorhizobium sp.
MRIAQVAPLDESVPPHLYGGTERIVSFLTEELVRRGHEVSLFASGNSVTTANLVPQGTTALRLDPNARRSSIAAHLAMLDEVRRQQDRFDVIHCHLSHFQHFPLFETFAEKTITTPHGRLDYSDLPSTYARWPYFSLSSISMRQRQPLPKARWVGNVYHGLPLHLYPATDRAPPQDPYLVFLGRIYRDKRPDRAIEIARLAGMRLKIAAKMDYSNRAYCEELVEQMKSPHVEFLGEVDEIGKAALFAGAHALLFPIDWPEPFGLAMIEAMAFGVPVIAWPQGAVPEVVDDGVTGFVVDTIEDAVAAIQRAHSLDRRQVRRRFEERFSASRMVDGYEAIYASVAAGMYEPKDVPRIVSIAGKGRSDQEWTNGNQISLNSRRGSMN

SEQ ID NO: 8702 - protein, 375 aa, Novosphingobium sp.
MRIAIIAHLKHPIAEPFAGGLEMHTHLLARSLRDRGHHVTVFASACSDAALGLEAICSETALDEVGTAEAQDVAFFKEHHAYLTLMNALRHSSFDVVHNNSLHYLPVTLADSLPMPMVTTLHTPPFCWLESGVRLCSAKNHGFVGVSNAVAQAWSHVAHAEEIILNGIDLERFAFRPEADAGGYLVWYGRIVPEKGLHFAIEAAEKIGLPLRIAGPILDQEYYEKRIAPMLGASARYLGHLGHAELAVLVGGARTFLCTPAWDEPYGLVVAEALACGVPVAAFARGAIPEILDESCGVLAVPDDVLSLAGAGLAALSLQRRACRARAEHLCDARRMVGAYEAFYRRKIANQTEEARLDGITYPGVLPFVAGHPGV

SEQ ID NO: 8703 - protein, 368 aa, Sphingobium sp.
MRIAIIAHLKYAIGEPFAGGLEMHTHILARSLRERGHDVTLFASTRSDPSLGLEAICEETSLLETGTAEANDVAFFREHHAYLGLMTALRTRSFDIIHNNSLHYLPVSMSDTLAVPVLTTLHTPPFCWLESGIRLNRGSMTYVAVSEATAAMWRHVANAEYVIPNGIDLRHFPYQPIANREPYLVWYGRIVPEKGLDYAINASRLAGLPLKIAGPISNQGYFEKLIAPRLGGDIEYVGHLSHIELSKLVGGAVAALCTPRWEEPYGLVVAEALACGTPVAAFARGGVPSLLKPDCGVLAEPDNVSSLASAALAASALERSACRAYAERYCCSRRMVDEYEALYRRLAMAQVAIPNESDIGLLPVADVA

SEQ ID NO: 8704 - protein, 359 aa, Unknown
  Description of Unknown: Oscillatoriales cyanobacterium sequence
MTNNSLKLLFLSTSVGQLGSGLGGGVELTVLNIAKELQRRGHKITVVAPAGSVLESIPVIEIAGDLQVTAQTQDYHDPIVMPADSVLANMWEYARQVQDDWDLIVNFAYDWLPFYLTPFFNTPIAHFISMGSMSRSFDRIAGQIAVKFPGTLGVCTLTQAQTFAFASECELVGNGGIDLSLYDFCSQPEPKLAWLGRIAPEKGLEDAVAAAKITGIPLKIMGKMQDEDYWQKICTDYPDAPVEYLGFLTTTKMQEQVRQCRALLMTPRWVEAFGNVAIEALACGVPVIAYERGGPAEIVRDGLTGFLVEPDSVNGLVSAIDRLDKIDRSACRRQAEVEYNLGAAGDLFERWFKSIVKLS

SEQ ID NO: 8705 - protein, 363 aa, Pedobacter sp.
MKIGVISHLKHPISAPFAGGLEVFTHQVTNALTALGHQVTLFASSSSDPTLPLEAILSDDHYDQVSRTRKGQRNLPSEYIAEHHAYFGLMCKIDALGLDVIFNNSLHYIPITMANTIRTPMVTVLHTPPFYELELAIAAERRRPVMNYVTVSYQSAFNWQKLIAECPVILNGIMLQDWDFYSSPAKEQYAIWFGRIHPDKGLHLAIKAARSAGIALHVAGAISDKRYYDREIVPILDTDITLLGLLNQKQLNQEIGEASVCLITPCWQEPFGLVVAEAMACGTPIAGFNMGALPELVTAETGVLVEFGNVPALGNAICQAMGLERKRIHLHAVNRFDFHHMIAAYEQLLEDIIEEKRNLNYAI

SEQ ID NO: 8706 - protein, 346 aa, Unknown
  Description of Unknown: Methylobacterium sp. L1A1 sequence
MFRVAQVAPNIFPVPPLHHGGTERIVHDLSMALRGIGVDVTLFASSDSVTEISRIGDHPSLDALERRYGRVAPGVPAALDALQLEALRLRLPEFDIVHAHGEFAHAALLGERRRRSLTTVHWRVDELDRALFFAGFPDLPVAAISAAQEAGIPPANRAGIVHHGIAADRYALRCEPDGHVAFVGRMTDQKRPDIAIRVARAAGIPIRLGGTIDVGNPDYFEQRVQPLLGPDATYLGPIDDTAKGALLGGARALLFPIDWPEPFGLVMIEAMACGTPVIAWNRGSVPEIVEDGVTGFVVTSEDEAVEALARIGQLDRRQVRRRFEERFTAERMARDYLAIYQRLLAA

SEQ ID NO: 8707 - protein, 354 aa, Paraburkholderia sp.
MRIAQIAPLHEAVPPKLYGGTERVVSYLTEALVDLGHDVTLFASGDSQTSAKLEAFWPQALRLDPSIRDTMAPHMLLLEEVRRRADEFDVLHFHIDYYPFSLFSRQPVPHLTTLHGRLDLPELQPIFNTFNEVPVVSISDNQRMPLPQANWLSTVYHGLPENLLTPRKDIEPSYLAFLGRISPEKRVDTAIRIAEKAGMKIKIAAKLDKADRTYYEEQIKPLFALPHVEYIGEISEGEKAEFLGGAHALLFPIDWPEPFGLVMIEAMACGTPVIAFKRGSVPEVIENGVSGFVVEDELSAVAALKRLPSLPRETVRKAFEARFTSKVMAQNYLASYENLLRQKRRTVLREVAAG

SEQ ID NO: 8708 - protein, 346 aa, Methylorubrum sp.
MIRVAQVAPNIFPVPPEHHGGTERIVHDLSVALRSLGIDVTLFASSDSATDLPRVGDHPSLAALERRNRQVPPGVPAALDALQLEALRLRLDRFDIVHCHGEFAHAALLGPRRRQSLTTVHWRVDELDRALFFAGFPDLPVAAISAAQEAGIPVPNRAGVVHHGIAAERYAFRPEPGAHVAFVGRMTDQKRPDTAIRVARAAGLPIRLGGTIDVGNPDYFERSVRPLLGPDATYLGPVDDRAKGDLLGGARALLFPIDWPEPFGLVMIEAMACGTPVIAWNRGSVPEIVEEGVTGFVVASEAEAVAALARIGQLDRAVVRRRFEERFTAERMARDYIALYRRLLAA

SEQ ID NO: 8709 - protein, 362 aa, Unknown
  Description of Unknown: Alphaproteobacteria bacterium sequence
MRIAQIAPLTEAIPPRLYGGTERVVHWLVEELVALGHDVTLFASGDSCTSAKLEAFWPRALRLDGSIRDPNALHMAMLEQVRRQADDFELLHFHLDYYPFSLFSRQATPFVTTLHGRLDLPELQPAFDTFSSIPVVSISNAQRRPLPQAHWMKTVHHGLPEKLLMPMPAKPSYFAFLGRIAPEKRVDRAIRIAEHCGIPLKIAAKVDRADIDYYEQEIRPMLASPNVEYIGEIGDKDKPEFLSGALALLVPIDWPEPFGLVMIEAMACGTPVIAFNRGSVPEIIDEGVTGFIVEDETGAIGAVDRLSHVSRAGVRKRFEERFTARRMALDYLSVYRSLTVVHAPHLRLVSEEDVPVAAASGS

SEQ ID NO: 8710 - protein, 348 aa, Unknown
  Description of Unknown: Betaproteobacteria bacterium sequence
MRIAQIAPLAEAVPPKLYGGTERVVSYLSEELVRLGHDVTLFASGDSETSARLVACAPRALRLDPAVKDPLAPLALMLERVRAQAHEFDILHFHLQHVHLPVFRPLARRTVTTMHGRLDPPELAPLYREFSEMPLVSISTAQRRLLPFANWIATVHHGLAREVCPFNPGPRGSYFAFLGRVSPEKGLDRAIETARRAGVRLRIAAKVDPCDEEYFQREIVPLLGLPGVEFVGEVNEAQKPAFLGNATALVFPIDWPEPFGLAMIEAMSCGTPVIAWAQGSVPEVVEEGRTGFIVDSMEGAVAALEKAARLDRLEVRNRFEERFSAARMAQDYLSVYRALGRRRAVAAL

SEQ ID NO: 8711 - protein, 698 aa, Polyangium sp.
MALTVLNVAYPLAPVGWDAVGGAEQILTAIDSALVRAGHRSLVIACEGSRCEGELISTPLPDGPLDEAARRQAWANHRAAMARTMERNRIDVIHLHGVDFHEYLPPPGVPALVTLHLPPAWYPAEVFDLSRPSTHLHCVSRTQRAACPPHARLLEDIPNGVPLDRLRPSKKSKEGFALVLGRVCPEKGIHLALRAAKRAGMPLRVAGRVFPYAVHERYFREEIVPLLDPDRMFLGPVGLAQKAKLLAEARCVVIPSLVPETSSLVAMEALACGTPVIAFGKGALPEVVEHGRTGFLVNDEQQLVEALENVESIDPAQCRAAAEERFSLEAMCGRYLGVYERLTRRVAAPRLEWQLVTSPRALLELREAWAALWSRCPNATVFQHPDWVLPWCEHLFSGELFTLCLRTGGRLAGVALMHRWHDGAERVLSMLGAGHSDYHDLLIEPEMAQAAKEALSAWLDAHADQWDRIEVSELRPGCPLLDLEPAGAIALVEEQDACPVLMLSADGGLEEQVPPRMAGNLRTARRRAEQMGEVSFESVRPDNLDELLDALLGLHASRWQERGDTGVLSADAVQRFHKDVARGFLGRGMLAFEVLRIDRKIVSVLYGFYDHQALRYYLGGFDPAFARASVGSLVLARAIEQALGRGVKEFDFLRGREPYKYAWGASDRPILRWRLVRNTKCGNPLETSSTDSSCRRAS

SEQ ID NO: 8712 - protein, 364 aa, Rhodoligotrophos sp.
MRIAQIAPLAESCPPKLYGGTERIVSYLTEELVRQGHDVTLFASGDSRTSAKLVPCCEMGLRLDKSVMDILPYHVIMLDEISRRADEFDVLHFHTDFIHYPLIRPLADRCVTTLHGRLDLPDLKPLYAAFPELPLVSISYDQRRPMPPVNWVGTVYHGLPRDLLPFTSRPKGNYLAFLGRISPEKRPDRAIEIAGRAGIPLKIAAKVDKADQAYWHSTIAPLIAMHPNVEFVGEINDNQKADFLGNARALLFPIDWPEPFGLVMIEAMACGTPVIAYPCGAVPEIIDDGISGFVVQSIPEAVAAVRHVDKLDRGEVRATFEERFTATRMAEDYLAIYRALPGVRTAVEPMPRVAGREFGLHVVA

SEQ ID NO: 8713 - protein, 263 aa, Unknown
  Description of Unknown: Chloroflexi bacterium sequence
MRVAMLAPISWRVPPRHYGPWERVVSLLTEGLVERGVDVTLFATADSVTQAHLDAVCPRPLEEDASLDAKVWESLHIANVFEKAVHFDLIHNHYDFLPLTYAGLVSTPVLTTIHGFSSDRIKPVYRRYAGRVAYVAISEADRDPDLPYLSTVYHGIDLSEFTPRESAGRGLVFFGRIHPDKGVADAIAVAKAVGLPLVIAGIVHDRVYFEREIAPHVDGDRVRYVGSLGPAERDELLGSALALLHLVEFAEPFGLSMIEAMAC

SEQ ID NO: 8714 - protein, 341 aa, Pedobacter sp.
MKIAIIVNPLIPVPPEKYGGIERIVYMLIQELKSFGHDITLFAHPDSAAGCKLVSYTGSEYFNFKDFVKINAITAKIIFNQFDIVHTFGRMSNIALLMPSKLPKIISYQLPPTLSQIKKAIKLSRKNSLHFTGCSDYIANQIRTLTPASTIYNGVNINDYTFSQMVIEDAPLFFLGRIQVDKGTHIAIDVAKRTNKKLIIAGNIPNEQIHQDYFKAYVEPFIDGEQISYIGPVNDQQKNNLLGKALAFLMPVTWDEPFGIVMVEALACGTPVIGFRRGAIPEVIKDGINGFICDEVTDMVNAVHKVDKISRKACRDVASEKFRSTKLAKQYEHLYLTAITQ

SEQ ID NO: 8715 - protein, 413 aa, Ktedonosporobacter rubrisoli
MKIAHIAPSWITLPPQNYGGTEHVLAYLLEEQVAQGHDVTVFAPADAHTSARQVSFFPRSLLPSGIPWSAHLKAYYHLHKAVSLLSRLQAEIVHLHLSSASDMYLFPLLASLSIPRLMTLHSCFPFDRVDSWVGDADHYYLREWANSMPMVAISEQARSHAPVELNFLGVVHHGLPMSHFPFSAQPPANYLAWMGRMVPEKGAHLAIEAARRAGIRLLLAGTIDRHVPGEMRYFEEKIRPQLDGEQARYLGPVDMAAKIELLGRARALLNPIEWEEPFGMVMIEAMALGCPVIAFSRGSAPEMVAPGRSGFLVENVEQMAQAIGMLGQVDRRQVRRYAEEHFSVQVMASKYLSLYRQVLAEQSPVALHLLLPASCTAKETPLLPTSIQIGEPAQAVTWPSHQARVALGEESAS

SEQ ID NO: 8716 - protein, 355 aa, Unknown
  Description of Unknown: Bradyrhizobium sequence
MRIAQVAPLTEAVPPKLYGGTERVVHWLTEELVTLGHDVTLFASGDSQTSAKLDATWPKALRLDGSVRDPNALHMVMLERVRQKADDEEFDFLHCHLDYYPWSLFARQPTPFVTTLHGRLDLPEHQPVFNTFSKIPVISISNAQRRPVPQAHWVRTIHHGLPENLLTPQPAKPSYLAVLGRIAPEKGVDRAIKIATRCGIPLKIAAKVDRADQEYYDELIKPLITSNPLVEFIGEISDREKPDFLSGAIGLLVPIDWPEPFGLVMIEAMACGTPVIAYNRGSVPEIIEDGLTGFIVEDEISAISSVGRLGTLNRDAIRKQFETRFTARRMALDYLAAFRSLMEAEPRFKLVASAE

SEQ ID NO: 8717 - protein, 335 aa, Nonomuraea sp.
MRIALLGPVAWRTPPRHYGPWEQVTSLLAEGLSAAGVDVTLFATLDSVTSGALDGVCPRGYANDPTLDGRVWEAMHVAHALSRSGEFDVVHSHLDWLPLAFADHCRAPLLTTVHGFSGMGILPAYVRARSAYVSISDADRAPELDYVATVHHGIDLDAFPFDPVGGRRLTAFGRVHPDKGTHRAIEIARRAGMPLTICGIVQDERYFEEEIVPKVDGEQVSFLGSVGPERRGQILGGAAALLHPIAFDEPFGLSVVEAMACGTPVVAYRRGSMAEVVDPGVTGFLVDTLDEAVTAVARIATIDRASCRAQAQRRFSADRMVASYLRIYREMLGQS

SEQ ID NO: 8718 - protein, 353 aa, Mesorhizobium sp.
MKIAHVAPLYESVPPRLYGGTERIVSYLTEALVDLGHEVTLFASGDSQTSATLLASRERALRLDSRPLKSEIAAHLSMLAQVRDRASEFDVIHFHLSHFLHFSFFEDLADRTVTTPHGRLDYVDLAPAYERFPRFPLISISHSQKAGLAKANWLATIHHGLPTTLYEPTFETTAEEPYLAFLGRFSRDKRPDRAIEIALRSGLKLKLAAKIGDDDRAYFHEVVEPLIDGDRIVYVGEIEEDQKAEFLGKAAGLLFPIDWPEPFGLAAIEAMACGTPVIAWNCGALSEIIDQGVTGFIADTMDGAVAAVPDLLQLDRRKVRAVFEKRFSARRMAGDYLAAYARLIGVPTEAKAS

SEQ ID NO: 8719 - protein, 354 aa, Mesorhizobium sp.
MTLTVLNVAYPLAPVGPDAVGGAEQVLSMLDQALVRAGHDSIVIGCQGSKAAGVLIETPAEPGVLDDAAKKRAQRSHRVAIEVARARWPIDVVHLHGIDFDAYLPDDGPTLVSLHLPLDWYPADALRPVRDDLWLHAVSVAQQRTAPPGARLVAPIPNGVDLDALSGRQSKRNFALVLSRICPEKGIHLALDAAKQAGVPLVIGGKVYPYQTHTLYFRDEVQPRLDKRRRFLGPLGFTAKRRFLNAARCLVIPSLAAETSSLVAMEALACGTPVVAFPNGALPDVVEHGRTGFLVNDVGEMAEAIVAASRLDPEICRAEARRRFSLARMISSYMDAYHALAGLGASRRGLAAAQ

SEQ ID NO: 8720 - protein, 289 aa, Mesorhizobium sp.
MMLEQVRRRADEFDVLHFHIDILHFPVVRDFAERTVTTLHGRLDLPDLAQLYAMFDDIPLVSISYDQRWPMPPVHWIGTVYHGLPRDLLPFRPKASGYLAFLGRISPEKGPETAIEIAARTGMPLKIAAKIDKVDQSYWKERVEPQVLRNSNVEFIGEIDERQKADFLGNAAALLFPIDWPEPFGLVTIEAMACGTPVIAFRRGAVPEVIDDGVSGLIVGTLDGAVDAVRRISGLDRARVRRTFEERFTVERMCGDYVAIYGSLSDDITKALGSQNKRAKNAAMMTMST

SEQ ID NO: 8721 - protein, 352 aa, Rippkaea orientalis
MLKLLFISTPVGSLGSGIGGGVELTLKNLAIEMNRRGHQVTVLAPESSILPNIDLIQIAGQCQQMAQAERRRNSIALLHNSVLGNMWDYARTIQYNYDIITNFAYDWLPFYLTPFFKRPIAHLVSMSSINPAFDQIITQVAQNFPKTIGVHSKIQAETFPFAASCRILGNGLDLSLYQCCLDPGESLGWVGRIAPEKGLEDAVAAAQITGIPLKIFGKMEDKSYWQQISQDYPHAPVDYQGFLSTFELQEQLGRCRALLMTPRWVEAFGNVVMEALACGVPIIAYRRGGPAEMVREGETGFLVEPDNITALVANIERIDTISRHRCRQQAEQEYSLNAFGDRFEKWFIELKK

SEQ ID NO: 8722 - protein, 369 aa, Unknown
  Description of Unknown: Methylocystaceae bacterium sequence
MIMKIAQIAPLIESVPPRLYGGTERIVSYLTEELVEMGHEVTLFASGDSLTSANLVPCVPMALRLDKQVHDTIPYYMLMLDRVRQQAHNFDILHFHVDFFPFPLFRSIARRTVTTLHGRQDLPDLPPFYSAFDDMPLVSISEAQRSPLPKDSFAATIYHGLPLQLHRPTFDPRGGYVAFLGRISPEKGPERAIQIAQTLGIPIKIAAKIDKIDEDYFRECIFPLLNGPGIEFIGEINERQKTQFLGEALALLFPIDWPEPFGLAMIEAMACATPVLAFQRGSVPEIIDDGVTGVIVDGMEQAATALPRVLGLDRRAVRRRFEERFSSALMAKNYVNLYRSLLIPVSPVVSSGERDSALPKLHDIPGIAH

SEQ ID NO: 8723 - protein, 349 aa, Unknown
  Description of Unknown: Candidatus Eisenbacteria bacterium sequence
MRIAQIAPLYESVPPKLYGGTERVVSYLTEELVREGHEVTLFASGDSVTQARLVAGSRQALRLDKRCIDQLAHHVVMLERAYRDTRRFDLIHAHCDYLHFPFARRQKTPVMTTLHGRLDIPDLVPLYREYPEMPVVSISNAQREALPWLNWRGTVYHGLPAGLLRFHERPGKYLAFLGRISPEKRVDRAIEIARRVGMEIKIAAKVDPVDREYFQSVIAPLLSWPKAEFVGEVGESEKDEFLGNAYALVFPIDWPEPFGLAMIEAMACGTPVVAFRRGSVPEVVDEGVSGFIVDHLQDAARAVERVASLSRRGVRAAFEERFSAARMARDYLSLYERLVQGREDLSLVG

SEQ ID NO: 8724 - protein, 236 aa, Unknown
  Description of Unknown: Calditrichales bacterium sequence
VVTTIHGFSSPGILPVYKKYNGKVFYVSISDADRSPDLDYIKTIHHGLDINQFDFQLEPDDYLIFFGRIHHDKGPKEAIEIATACNKKLVLAGIIQDEAYYKKYIVPHLDNSNVVYAGSAGPVQRNQLLGKATALLHPINFNEPFGLTVIESMACGTPVIAFNRGSMPELIENGKNGFLVNTIGEAIAAVGRVKDINRAYCRHRVEQYFTINRMVEEYIQVYGMILDKRKGQKYRE

SEQ ID NO: 8725 - protein, 346 aa, Unknown
  Description of Unknown: Methylobacterium sp. BK227 sequence
MLRVAQVAPNIFPVPPDHHGGTERVVHDLSTALRSLGVELTLFASSDSATDLPRVGDYPSLAALERQYGRVAPGVPAALDALQLEALRRRLDAFDIVHCHGEFAHAALLGGRRRHSLTTIHWRVDELDRALFFQGFPDLPVAAISAAQATGIPASNRAGIVHHGIDRTRYSLRAVPDDHVAFVGRMTDQKRPDVAIRVARAAGLPIRLGGTIDVGNPDYFDRRVRPLLGTDATYLGPVDDARKGELLGGARALLFPIDWPEPFGLVMIEAMACGAPVVAWERGSVPEIVEDGVTGFIVSTEAEAVEALARIGQLDRATVRRRFEERFTAERMARDYLALYQRLRAA

SEQ ID NO: 8726 - protein, 343 aa, Pedobacter sp.
MKIAIIANPLIPVPPTQYGGIERIVYMLIQELISSGHEVTLFAHPDSEPNCELIGYTGSEYFNLIDFFKINYITSKILFNTFDIVHTFGRMSNITMLMIAKLPKVVSYQLPPTLNQIKKALKLSRKNTLYFTGCSDYIANQIRTLTPTSTIYNGVNINDYTFSQTATEDAPLFFLGRIQVDKGTHIAIDVAKRTNKKLIIAGNIPNEQIHQDYFKEFVEPFIDGVQISYVGPVNDQQKNNLLGKALAFLMPVTWDEPFGIVMVEALACGTPVIGFRRGAIPEVIEDGINGFVCDGVTDMVNAVHKVDKINRKACRDVASEKFSSTKLAKQYEHLYLTAIPNKN

SEQ ID NO: 8727 - protein, 350 aa, Unknown
  Description of Unknown: unclassified Bosea sequence
MRIAQIAPLAESVPPRLYGGTERVASWLTEELVRQGHRVTLFASGDSQTSAELVACAPQGLRLAGIRDHTASHLAMLAKVRERQESFDVIHFHLDLLQHAMFSDLTHKCVTTLHGRLDLPDFLPVYQAFPRMPLISISDGQRTPMPSTANWLATVHHGLGPGLCPFEARGGDYLAFLGRITPEKRPDRAIEIAKRAGMRLRIAAKVDAVDEEYFRSQIEPLLDHPLIEFIGEIDEAQKAGFLGGARALLFPIDWPEPFGLVMIEAMSAGTPVIAWRNGSVPEIVRDGVSGIIVDSIAEAVSACERSTAMDRSKVRAHFEQHFTAERMARDYLEAFGRLLSSPQGYTKAAE

SEQ ID NO: 8728 - protein, 350 aa, Parashewanella sp.
MKILIISTPVQAIGQGEGGGIDITLLNIINALSPLGHQFTVLAPTGSKLSADATLIEISGRLQTSVQTESASTPATMSHDSTIVSMCRYAQTHQDQFDVILNMAYDWLPIWLTTFFTTPIHHLVSMSNENQTVADAIEELNRMMPQRIAFHSHASANTFQLENPVTIIANGFEFTNFPFCKSPKQQLAWVGRISPEKGLENALEVANKVNLPLHIWGKVQSESYQQQLVEKFPEVDIHWRGFVPQQQLLKEMSQSALMLMTPSWIEAFGNNVVEANACGVPVIAYNKGGPTETVISGVTGYLVENNEDMANRVADALKLSRYHCRDSAQQRFSIEQYALKLQSWLSLNID

SEQ ID NO: 8729 - protein, 328 aa, Moraxella caviae
MKILHVLLTRLAIPPKDYGGTERVIWALAVAQRQMGHEVRFLTKANPNNNPDVQLYDKSKSIAEQIDDWPDVVHFHWPYDGELHKPYICTEHSNAEKAQEYPINTVFLSSKHAENHGATCYVHNGLYWADYSEPNLDNPKDYVHFLAKAAWRVKNLQGTIDIAKQAGKRLEVIGGKRFNLSRNPYFYLSPNIGFNGMVGGVAKDNLIKNSKGLIFPVLWHEPFGLAIIESMYLGCPVFASPFGSLPDIISHDGLGVLSDSYSELAEAVKQVDKYDRRVCHEHAKTHFGHEAMGRAYQKCYERVIAGETLNPTRPKSTGNVKALLEMKP

SEQ ID NO: 8730 - protein, 330 aa, Unknown
  Description of Unknown: Alphaproteobacteria bacterium sequence
MKIAQIAPLYEAVPPSLYGGTERIVAHLTNALVELGHDVTLFASAEANTRATLVPVRDQAIRLDRFPLKSDLAAHLSMLHELHLRRHEFDLLHFHVDLIHFPFFEDLAARTVTTLHGRLDLKDLPEVYSRWRDYPLVSISDDQRKPLASANWLATIHHGLAEGVYSFNETPSDPYLAFLGRISPEKRPDRAISIAKRLGIRLKIAAKVDAVDVGYFHDEIKPLLADPLIEFIGEIGDSEKSAFLGNAAALLFPIDWPEPFGLVLIEAMACGTPVIAWRCGSVSEIIENGKTGFIVDTEDEAVGAVLKLDQLDRRMVRKVFQERFTADVMA

SEQ ID NO: 8731 - protein, 364 aa, Rhizobium laguerreae
MKIAQIAPLAESVPPKLYGGTERIVSYLTDELVRQGHDVTLFASGDSVTDARLVPCSDVALRLNPAVKDHLPHQVVMLEEVRRRAHEFDVLHFHIDLLHFPLIRDFADRTVTTLHGRLDLPDLRPFYMAFPDIPLVSISNDQRRPMPPVKWVGTVYHGLAADGLPFTAQPKGNYLAFLGRISPEKRPDRAIQIAAKAGMPLKMAAKIDDADKAYWQTVIEPMVKSHPNVEFIGEINEHQKAEFLGNAGALLFPIDWPEPFGLVMIEAMACGTPVIAFSCGSVPEVVDSGLSGIIVDTVTEAVENIEWALRMDRRKVRETFEKRFSAKRMASDYLDIYRSLPGGRTEAARMRRPNRTVPDLQVVA

SEQ ID NO: 8732 - protein, 353 aa, Mesorhizobium sp.
MRIAHVAPLHESVPPRLYGGTERIVSYLTEGLVELGHDVTLFASGDTRTSAKLVPCRERALRLDPRPLKSETAAHLLMLSEVKKRAQQFDIIHFHLSHFLHFSFFSHISERTVTTPHGRLDYVDLAPAYERFPRFPMISVSRSQRMGLANANWLATIHHGLPTDIYEPTFETDRGEPYLAFLGRMSRDKRPDRAIEIAQRSGLKLKLAAKIGDDDRAYFHKVVEPLIDGDRVDYVGEIEENKKAEFLGKAVGLVFPIDWPEPFGLAVIEAMACGTPVIAWNAGAMPEIVDQGVTGFIVDSIEGAVALVPGLRRLDRRKVRAMFERRFSAKRMARDYVAAYACLIGASAEARAS

SEQ ID NO: 8733 - protein, 348 aa, Unknown
  Description of Unknown: Deltaproteobacteria bacterium sequence
MLRIAQITSVSIAVPPSTHGGTERMVYQLTEGLVRRGHAVELFASGDSRVSCPLHSVTPTALLDRPDWSTYLEREYETMNAFQLFRQAERFDLIHGHWPCLAPYFSRFTQTPMSLTYHYISPELLEFYETHFPRCHGVFVSHAQAVGLNRPHGRVIHNAVHGEDIPCGDGAEDRLIIVARMVPNKGIAEAIRIAQRAGKPLLVIAPVMHNFAESPVYFREIVEPLIDGKEVQYIPALPNDLALREVGRSRAFLFPLQWEEPFGLAVLEAMATGTPVIAYRRGGMPELVEDGVTGFLVDSEDEMLAAIREVGKLDRARCRERTLARFSGERMVSAYEQLYDKILASHRT

SEQ ID NO: 8734 - protein, 451 aa, Unknown
  Description of Unknown: Syntrophobacterales bacterium sequence
MHIAMLSPIAWRTPPRHYGPWESVVSLLTEGLVARGVDITLFATKDSITKGRLHAVCKKGYEEDVHAEPKVVECLHISELFDRAGDFDIIHNHFDFLPLTYSGLVKTPVVTTIHGFSSPRILPVYEKYNGKVFYVAISEADKAAGLDYIRTIHHGIDLDEFTFNPEPQGDYLLFFGRIHFDKGAKEAIEIARRSKKRLIMAGIIQDEVYYKREVEPHLDSDGITYVGSVGPEKRDALLRDASALLHPINFNEPFGLSVTEAMACGTPVIAFNRGSMPELIRDGVNGYLVSTVEEAVHAVGRLGDINRADCRKFIEENFSVERMVTDYIKVYEEIIEKIKPEERRHWGYYEVFIDDPDHKVKRIVVYPGKRLSLQRHRRRSEHWHVIYGEAVVTLDDQEIILKAGDSIDIPLGGVHRMANRGKENMALGEVQRGDYFGEDDIERLEDDFGRN

SEQ ID NO: 8735 - protein, 372 aa, Novosphingobium sp.
MRIGIIAHLKYPIAEPFAGGLEMHTHLLARTLRDRGHAVTVFASVRSEFGLGLEAICTETSLDDVGTAEATDVAFFKEHHAYLSLMNGLRDRDFDIIHNNSLHYLPVTLADTLPMPMVTTLHTPPFCWLESGIRLCKANDHAFVAVSKSVGQLWEHVAKAEEVILNGIDLDKFSYQPQPDPNAYLVWYGRIVPEKGLHFAIEAARQIGLPLRIAGPILDREYYRMHIAPQLDANIIHVGHLDHTELARLVGGARAFLCTPLWDEPYGLVVAEALACGVPVAAFARGAIPEILDASCGALAEPDNVASLAEAGLAALRLERSACRQRAERTCDAARMVDGYEALYRHRISLRHPGPAEVFAACQPIAPAARHA

SEQ ID NO: 8736 - protein, 356 aa, Unknown
  Description of Unknown: Alphaproteobacteria bacterium sequence
MRIAQVAPLTEAVPPKFYGGTERVVHWLTEELVALGHEVTLFASGDSRTSAKLDATWPKALRLDGSVRDPYALHMVMLERVRQKCDDEEFDFLHFHLDYFSWSLFSRQPTPFVTTLHGRLDLPEHQPVFNTFPSAPVISISNAQRRPVPQANWVRTIHHGLPENLLMPKPVSRDYLAVLGRIAPEKRVDRAIEIATRCGIPLKIAAKVDRADQDYYDELICPLITRNPLVEYIGEISDHEKSDFLSGAIGLLVPIDWPEPFGLVMIEAMACGTPVIAYNRGSVAEIIDEGLTGFVVEDEISAVARVDRLAGLDRGAIRKQFEARFTARRMALDYLAAYRGLMEPAEPRIKLVSSAE

SEQ ID NO: 8737 - protein, 377 aa, Unknown
  Description of Unknown: Methylobacterium sp. AMS5 sequence
MRIAQVAPLAEAVPPKFYGGTERVVSWITEELVRQGHDVTLFASGDSQTSAKLAACHPEGLRLLGYRDHTAGHLAMLHHVHRRAHEFDVIHFHIDLLQYPMFEDLYHKCLTTMHGRLDVPDFMPVYNTFTGMPLVSISDNQRDPMPESSNWLATIHHGLPKQNCPYYPEAKGGYLAFLGRISPEKRPDRAIEMAIRSGTPLKIAAKVDKADQEYWDEKIEPMIHHPLVEYIGEINEEQKKDFLGNALALAFPIDWPEPFGLVMIEAMSAGTPVIAFGNGSVPEVIKDGVSGFIVNSMDEAIEACRKVKDLPRAGVRAHFEGRFTAEVMVRKYVSTYEQLLAGQGNVIKMPAAGAFSPQYGELNGSAHGPIHVAAMPA

SEQ ID NO: 8738 - protein, 362 aa, Unknown
  Description of Unknown: Candidatus Jettenia ecosi sequence
MRIAQVAPLIERVPPEMYGGTERVVYYLTEELVKRGHKVTLFASGDSVTSAKLVPIHEKALRFDPDIENCYPYHMLELGIVYDRAREFDLIHSHMDFMTFPFTTLVSTPTIHTLHGRLDIPDIHKIYKHYRNCNFISISNAQRKFIPDLNWIDTIYHGYPLEKFPFNQEPEDYLVFVGRISPEKGPVEAIQTAKKAQKKLIIVAKVDPVDRNYYEEKVKPLITPPLIEYVGEKTEEERNEIMKKAKALIFPLDWPEPFGLVIIESLACGTPVITRNRGSIPELMIHGKTGFICETWEEMADAVQNLKDIDRRACRRHTEDNFSISHMVSRYEKAYELITSNNRPKILPLRLDRGSAKSQVTP

SEQ ID NO: 8739 - protein, 356 aa, Microcystis viridis
MSRKLLFLSTPVGFLGSGGGGGVELTLYNLARTLTRQGYPVRVVAPEASQLHDIPLITIAGNAQISAQSQGRQAPILMPENAVLANMWHYAQQVQNQYDLIVNFAYDWLPFYLTPFFATPVAHLVSMASVSLAMDHIIEKTYSNFPHLLAFHTLAQAETFSLSPPYRCLANGLDVSLYQFRDDPSPCLAWVGRIAPEKALEDAIAACQQLGVPLRVFGHISDPLYWQNLQDTYSFDLVDYRGFLPTGSLQKELGDCFGLLMTPRWVEAFGNVAIEALACGVPVVAYRRGGPVEIIEEGKTGFLVEPDSIEGLVTGIKNLDRIDRYSCRAVVEQKYSLEALANRAINWFEEIFARKK

SEQ ID NO: 8740 - protein, 358 aa, Synechococcus sp.
MKLLVVATALGPVGSGRGGGVELTLAGLVAGLLQRGHRITVLAAEGSGLPADCASAELWTCAGTPQPSVQHQGRDAAITMPLDALLARFWQRVLLEAPAHGFDAVLNLGYDWLPFWLTSSAPLPLLHLVSMGSVNAAMDGVIADVAAWDQRRLAFHTAAQAADFALVQPPVLLGNGFDLSAYRFCEQPDALLGWVGRVAPEKGLEDAAAAAARCGLPLAVWGLVEDEAYAAAVQASVPAGTLQWRGFLPTAQLQEALGRCQALLNTPKWNEAYGNVVVEAMACGVPVVAYRRGGPGELVQPGVNGLLVDPDDVEALADAVTEVKRIDRRACRQWVEAHASRAVLAERIEAWVEQALQP

SEQ ID NO: 8741 - protein, 351 aa, Reyranella sp.
MRIAQVAPLTEAIPPKLYGGTERVVSWLTEELVALGHDVTLFASGDSQTKARLEPVWPRALRLDGKVRDPMALHMAMLEHVYQRADQFDILHFHLDYFPFSLFSRNATPFITTLHGRLDLPEHQVVFDVFNRAPVISISDAQRQPVPNAHWIDTIYHGLPADLLQPRPAKPGYLAVLGRIAPEKAVDRAIHIARRAGMPLKIAAKVDPVDRQYYEHEIRPLLELPGIEYIGEISDAQKSDFLGGAVGLLMPIDWPEPFGLVMIEAMACGTPILAYPGGSVPEIVEDGLTGFIVNNEAEAVDAVRRLPELSRARIRARFEERFTARRMAMDYLSVYRRMAESDAPRLRVVTA

SEQ ID NO: 8742 - protein, 353 aa, Camelimonas lactis
MKIAQIAPLAERCPPKFYGGTERIVSYLTEQLVDMGHDVTLFASGDSVTAAQLRGCSGMALRLDPDVQEQLPWHLAMVDRVRRQAREFDVLHFHVDLLHFPIFRDIAHKTITTLHGRQDLPDLPPFYRQFPEFPLVSISHAQRTPMPAGVTWAANVYHGLPERLLTPQNSPDGDYLAFLGRISPEKRPDRAIAIAARAGMPLRMAAKIDRADACYWAETIEPMVRACDCVTFRGEIGETEKPEFLGNARALLFPIDWPEPFGLVMIEAMACGTPVIAWPCGSTPEIIDHGVTGFLVNSIDEAVAAVRMAGELDRDKVRARFEQRFSAARMARDYLAVYERLTNARPAAPLLIA

SEQ ID NO: 8743 - protein, 364 aa, Rhizobium laguerreae
MKIAQIAPLAESVPPKLYGGTERIVSYLTEELVAQGHDVTLFASGDSVTDARLVPCSNTALRLNPAIKDHLPHQILMLEEIRRRAHEFDVLHFHVDLLHFPLTRYFADRTVTTLHGRLDLPDLWPFYKAFPDIPLVSISNDQRHPMPPVNWLGTVYHGLPASLLPFTEKPAGGYLAFLGRIAPEKRPDRAIEIAAKVGMPLRIAAKIDNVDKHYWETVIRPMVMSHPNVEYIGEINDRQKAGFLGNAGALLFPIDWPEPFGLVMIEAMACGTPVLAFRSGSVPEVIDDGISGILVDTVAEAVENIEWALQLDRRKVRANFERRFTAGRMARDYLAVYGQLHGLRAKAPQRRRANRPISIDQVVA

SEQ ID NO: 8744 - protein, 357 aa, Sphaerospermopsis reniformis
MSQPTYKLLFMSTGVGALGSGLGGGIEVTLPNIVKAMQQRGHTIDIVAPAGSRSGSLPLIEIPGNTQNAAQDQKYDAEIGIPTNSVLANMWSYAYQVQGNYDLILNFSYDWLPLYLTQFFPRPVAHLISMSSLLNAMDDMIAKVATQFPHAIGVHSKTQAATFPCPDECVCLFNGLDLSLYQFCDQPGNSLGWVGRIAPEKGLEDAVAAANTLGMPLKIFGLMQNEEYWQQVRQAYPDAQIDYQGFVSTNELQAGLRECQAMLATPHWIDAFPTVGLESLACGVPVIAYSRGGLVEIVEDGKTGFLVEPDSIQGLIDAVKRVHTIDRQNCRQQAESLYSLAAMGARVEQWFEKILHR

SEQ ID NO: 8745 - protein, 351 aa, Methylorubrum sp.
MRIALLAHLRHPIAPPFAGGLEAYTWHLADGLTARGHEVALFAAGDSDPRFSIDPVIPVHHERSFPGLEHRGDSGLKAHVDAGYAAACDRIATGGFDVLHNNSLSRLPLERHRTAAVPTVTSLHVPPYDALRWWVHDSVAPGHRITVTSQAQARAWWPDGPPPEVSVLHNGIDPASWPFQADGDGSAVWCGRIAPIKGTHLAVRAARKAGLPVTLFGPIEEPEYWETQVAPLIGGPIRYGGHLGSPALAREIGRASVFLFTPCWDEPFGLVAVEAMACGLPVAGFARGAAAEVVGEAGCLVPPEDDAALSRAIGTALTIPRTVPRARVHRLFTRDRWLDRCESLYAAARAG

SEQ ID NO: 8746 - protein, 350 aa, Nonomuraea zeae
MRVALLGPVAWRTPPHHYGPWEQVTSLLAEGLTARGIDVTLFATLDSVTSGSLDGVCPRGYADDPSLDGRVWEAMHVAHALSRSGEFDLVHSHLDWLPLAFAGHCRAPLLTTVHGFSGTGILPAYARARSAYVSISDADRAPELDYTATVHHGIDLDAFPFDPVGGRRLIAFGRVHPDKGTHTAIEIARRAGLPLTICGIVQDERYFEREVAPKIDGEQVRFLGPVGPERRGEILGSGAALLHPIAFDEPFGLSVVESMACGTPVVAYRRGSMAEVVDQGVTGFLVDSLDEAVTAVSRISTVDRAGCRAQAERRFSADQMVANYLRIYHEMVGQNSRLIVSDGRADHAIG

SEQ ID NO: 8747 - protein, 361 aa, Halomicronema excentricum
MDAAPKYRILLISTAVAPLGTGLGGGVELFVKNAVQGLQQRGHRVTVVAPAGSQLENCDRLVPVEGQLQPTAHTSDRQTPIVMPKSSVLSAMMAYAQQVQSDYDVLLHFCYDWLPFYLAPFLQIPIAHYVSMGSLTDAMDAVIAQVTTQFPGTVGVCTQAQAATLPHAETYRPIGSAVDLALYDFCAEPGAALGWMGRISPEKGLEDAIAAAQATQTPLKILGKLEDQAYWEHLQKNYPEAPIQYLGFLDTHGLQAAIRDCRALLMTPKWVEAFGNVAIEAMACGVPVIAYRRGGPTEIVRPGKTGWLVEPDSVVGLVDAIAQIAQLDRSACRQQAEAEYSLDALAQRYEHWFHDILTRYA

SEQ ID NO: 8748 - protein, 360 aa, Paraburkholderia caballeronis
MRIAQIAPLYERVPPLAYGATERIVHYLTEALVASGHDVTLFASGDSVTSARLVACCESALWRDERVEDTLGHHVHLLERVAQRAAEFDVLHFHCEPLHLPLARRLDTHCVTTMHGLLREPDVGALLRAFSDAPLVSISASQRRAMPFANWRATIHHGLPADAFGLCMSPGDYLLWMGRMMRGKRPDLAIEIARRAGLPLKMAAAVHPGERAYFADEIAPLIESSAGFVEYLGEVGGDARTELLRHARALLFPIDWDEPFGMVMIEAFACGTPVVAFRRGAVPEVVEDGVSGFVVDDLDGAVRAVERIDELDRRRCRAAFDARFTAERMARDYLRVYRALARGAERDTDLQSSRPQPAAR

SEQ ID NO: 8749 - protein, 370 aa, Sphingomonas sp.
MRIAIIAHLKYAIREPFAGGLEMHTHLLATALRRRGHAVTVFASMKSDPAMGLEAICDETSLLETGTAEAQDVTFFREHHAYLRLMSMLRNRRFDVIHNNSLHYLPVSMAETLDTPMVTTLHTPPFCWLESGIRLCKSPSMRFVAVSDTIRGLWSHVTPIDRTIPNGIDLASFPFQPAASPDRYLVWYGRIVAEKGLHLAIDAARLAGYPLRIAGPISDPDYYAAEILPRLGADVTHVGHLEHAALGALVGGASAFLCTPRWEEPFGLVVAEALASGTPVAAFARGAIPALLDESCGTLARADDVASLADAARRAVLLDRRACRLRAEAICDADVMIDRYEDLYEEMIQPTRHAARGRASDYPITLAGAA

SEQ ID NO: 8750 - protein, 346 aa, Unknown
  Description of Unknown: Deltaproteobacteria bacterium sequence
MKIAQISSVYLSIPPKTHGGTERIVFDLCQHLTKRGHKVELFASGDSQVDCSLQSVLPVASSDDPQSTFYLEKEFEARNTYNLYRQAERFDLIHAHWPTLAPYFSSFSQTPTVITYAYIEKQLHEYYRTHFPRCFPVCISRTQARMLGDDSLPVIYNGIEVGEIPFNSQPEDFFIAVGRMTPGKGIAEAIRIAKRANARLLIVGQITSHLPWSEKYFSNEIQPHIDGDRIRHIERLPHDELMKTVGRAKGFLFSPQWEEPFGLAVAEAMAAGTPVLAYPRGSMPELVKHGESGYLLRTEDEMVEAIHRIESLDRRRCREWVEENFSVEQMVNGYERLYRQIAGSAR

SEQ ID NO: 8751 - protein, 336 aa, Micromonospora kangleipakensis
MKVALLGPVAWRTPPRHYGPWEQVTGLLADGLAARGVQVTLFATLDSITSATLDGVCPRGYAEDQSMDGRVWEALHVSHALARSAEFDLVHSHLDWLPLAFAEHCHAPLLTTVHGFSGAGILPAYEKGRSSYVSISDADRISGLEYLATVHHGVDLDGLPFTLDPGPGLVAFGRIHPDKGTHAAIEIARRAGRPLTICGIVQDERYFSEQIAPHIDGERVTFHGAVGPRRRGEILGGSTALLHPIAFDEPFGLSVVESMACGTPVVAYGRGSMPEVVDEGVTGLLVQTVEQAVEAVGRVASIDRAGCRARARQRFGADRMITDYLAVYDGIGRPER

SEQ ID NO: 8752 - protein, 364 aa, Unknown
  Description of Unknown: Rhizobiaceae bacterium LC148 sequence
MKIAQIAPLAERVPPKLYGGTERIVSYLTEELVAQGHDVTLFASGDSVTNAKLVRCSDVALRLNPAVKDHLPHHVVLLEEIRRRAHEFDVLHFHIDLLHFPLIREFADRTVTTLHGRLDLPDLHPFYQTFPDIPVVSISNDQRRPMPPVNWRGTVYHGLPDDVLSFTEKPEGHYLAFLGRISPEKRPDRAIEIASRAGMPLKIAAKVDNADKAYWETVIEPMVKSYPNVEFVGEINEHQKASFLGNAGALLFPIDWPEPFGLVMIEAMACGTPVIAFRCGSVPEVIDNGQSGILVDSIIEASENVEWALRLDRRKVRATFERRFTAERMASDYLDIYRQLPGTRTRAARLRRSSGHAVDLQVVA

SEQ ID NO: 8753 - protein, 370 aa, Synechococcus sp.
MASVPRDLVLVSTPIGYLGSGRGGGVELTLASLTQGLQARGHRLTLVAPEGSSLPAGCDGVALHTVAGGDQPSWQHADADGPVLIPPDAVLPRLWERALALGEEADAVLNFSYDWLPLWLTPRVQPRIFHLISMGSVARVMDQLVADLACWDQRRLAFHTHRQAADFSLPAVAQVVGNGFDLSRYQFQPEAGGALGWAGRVAPEKGLEDAAAVAAALQEPLQVWGVVEDPAYAARVERAVPPGTIVWRGFLPTAELQKELGRCRALINTPKWNEAYGNVVVEALACGVPVVAYDRGGPGELLQNGVTGWLVPPDDRDALLAATRKVDAIDRQACRRWVEAHASQAVFAERVEQWLDLTLAAGDGSISRCP

SEQ ID NO: 8754 - protein, 384 aa, Sphingobium xenophagum
MRIGIIAHLKHPIAEPFAGGLEMHTHLLARSLRDRGHAVTLFASSRSQPGINLEAICAETAIQTVGTTEASDVPFFREHHAYLSLMTDLRHRDFDIIHNNSLHYLPVAMADSLPMPMVTTLHTPPFCWLESGIRLCTARSHSFVAVSRSVAALWNHVTHSDAVIWNGIDLQKFAFHPQPAVDPYLVWYGRIVPEKGLHLAIEAARRVGLPLKIAGPILDDNYYRTEIAPALSQDVAHVGHLTHEQLAHLVGGARAFLCTPMWDEPYGLVVAEALACGVPVAAFARGAIPEILDSKCGVLAVPEDVTSLANAVLAALALDRSACRTRAEQMCDADRMVDNYEALYLRQIARAAPTVCSEKTASIHLMPSTRLPHSASSASSAFLG

SEQ ID NO: 8755 - protein, 404 aa, Unknown
  Description of Unknown: ANME-2 cluster archaeon sequence
SKTAGKLHTIGAKPYEEDKELDPKVWECLHISELFEHADEFDIIHNHYDFLPLSYSGLVQTPVVTTIHGFSSKKILPVYQKYNGKVFYVSISDADRSPHLDYVATVHHGIDIDGFPFNENPDDYLLFLGRIHPDKGVREAIEIARAAGMRLRMAGYIQDQHYFETEVKPFIDNDQVTYEGHVSNDVKNWLLSNAVALLHPIHFEEPFGLTVVESMACGTPIIANKKGSMPELIQEGENGYLVTDIKEAVIALKKIPNISRRRCREIAKELFSVERMVDDYIRIYDLILSKCKREDHRPWGYYETISESSDSKVKRINVYSGKRLSLQRHKQRNEHWYVIKGIGLVRLNDREFQLQSGDSIDIQKGASHRITNPGQDNLVFIEVQTGEYFGEDDIERLEDDFGHE

SEQ ID NO: 8756 - protein, 348 aa, Kribbella sp.
MKILQISSCWARTPPDGFGPAEEVTYDLSVELAAAGHEVTVFATGDSTVGLPLAFHFPEVPEYSPANPRKHVEAAVEYANSHDFDIVHNNESKHGALLAHTIRRPTITRANWLYDADFLQQFHALDEKARRATRFVAISHRMRTLLPELSFAGTVHNGIDVDGFPFGADKQDYVLFLGRIIPEKGVDLAIEAARTAGVPLVIAGQLLDRHRKFFEQKVAPALDGDQVSWYGPASRTQAKQLLRDARALLMPYRWEEPFGKVLVEAQACGTPVVSVPWGAVPEVVADGITGFLRATAEEMAAAIGQVDRISPTACRERAVTRFSRGRMAADYVHLYEKLLVDAGRGSRR

SEQ ID NO: 8757 - protein, 366 aa, Unknown
  Description of Unknown: Alphaproteobacteria bacterium sequence
MHIAQVAPLTEAVPPKLYGGTERVVHWLTEELVALGHDVTLFASGDSRTSGTLEPMWPKALRLDGSIRDPNALHMMMLERVRQRAAEFDFLHFHLDYYPFSLFSRQPTPFVTTLHGRLDLPEHQPVFTTFASIPVISISNAQRRPVSQARWVRTVHHGLPENLLRPRPVKPSYLAFLGRIAPEKCVDRAIRIAARCEIPLKIAAKVDRVDVDYFETEIRPLLSLPFVEYIGEISDREKSEFLSGAIGLIMPIDWPEPFGLVMIEAFACGTPVVAFNRGSVSEIIEDGLTGFVVEDETSAIGAVNRLSQLSRERVRKRFEERFTARRMAKDYLAVYRSLMEERAPRPKLVAVQGLHPEGAASAQPRG

SEQ ID NO: 8758 - protein, 368 aa, Unknown
  Description of Unknown: Gordonia sequence
MRDTLRIAIVASSRYPIAQPFAGGLEAHVWHLTRALTLAGHEVTLFAGAGSDLPVDSDRLRGELFEPSAAARSDVSMPQLEALQDHHAYLSLMLSFTNNPGDYDVIHNHSLHYLPVAMGPAVETPMVTTLHTPPTPWLESALTLAPGTRCVAVSRHTAQSWSHVLGEIPVVHNGVQLDRWPAGPGGDDLVWFGRFVPEKGAHLAIEAAQRAGRRLRLAGPISDTRYFEQQIAPSLGGLVHYEGHLHQHDLARLVGSSGVTLVTPVWDEPYGLVVAESLACGTPVACFARGGIPEIVGEHAGVLVPPGDIDALALAVDDALTLDRGLVRRRAEDHCTDIAMIDRYLDIYADLVAGRPLADSSLPREVGV

SEQ ID NO: 8759 - protein, 1017 aa, Onthophagus taurus
MLFKIFLIINVHFVLAENILFVNLVPSPSHHIWNEALIEGLLSKNHNVTMIGFYPANIISNNYSILQINDEKFTENISSTLKNVIDETSVKSILSMWEFIQKSCEFNMNSEEFKALLNYPKSFFNLLIFDITFSECYLPLIDHFNNQPAIGVTAFGLQTYLNDIIGESIQIYTPYYGLPYTDKMNLFQRFCSIFYTTIERLSRFYYLPKLDEINKKVFGENVRKINELGNEISLIFPNDDPILDYPKPNVPNVIQIGGVHLKEINQSATKIDEDLEKILNNSVEGIVFVSLGSNFQPKFYKDHVKSAFIEAFSKLNQTILWKFDDIVTSKNVIIKNWFPQSDILAHSNTKLFITHCGALSSQETIFRGIPIIGIPLFHDQYYRSAKFEEIEAGIILNYKEITANKLYESINEVLMNSRYKENMMKLSSLYKNQPLKPLDKFLMWFDYLLKNGDLRNLSVAGRKMSWYQTNNYDILGLIVVIVVVVKMLVNKLVFNGGDKKEKTDRTTLIMLKFFLVLISIQQITCKHILFINLVLSPSHHGWNEVLIEGLLSKNHNVTMIGYYEPKIKHPNYNVLQVDVKPFAQNVDAIYEQASADGSASIKSIFNLATFAENGCKYSLNTQQFKQLLDYPKDSFDLIIFDITLSECFLPLIDHFGLPPTVAVTAFGMNTYYNDIVGQSTENYIPYFGLPYTDQMSFFERMHNLFYLTMESIIRVNSIKKLNVISKESFGTKSRSIEDLFKEISLIFPNDNPILDYPRPTAPNVIPIGGVQVKPPKKLDKDLQKILDDSKQGVIFVSLGSNFLPKFYGKHVIKAFKESFSKLNQTVLWKFDDDGDLSKNIITRKWFPQSDILAHPNTKLFITHCGGLSTQETIIRGVPVIGIPLFADQFNRAGKYQSINGGVILKYSELTTDKVYNSIVEVLSNPVYKNNMKRCSMLYNEQPEKPMEKFLIWTDYILNNGHLKHLSLARREMRWYQVDNWDIFGFIIGVCLFLYVLLKKISCVILKMCKTDRKEKIN

SEQ ID NO: 8760 - protein, 512 aa, Biomphalaria glabrata
MSNKMFYPALLAVLVVSPYLCGAKHVVMMPAPTKSYLIYHAKVGHALTELGHTVSICVPDYLANKGFVPNKAISIIKYGKQLGDIEAYIFNKTNIIAGFWAGEVPGIGNLGILINTFKEVVNQILSEEAFITSIRDLKPDFLILESFVFTRNLIVLPYKLDIPFGLIGPSQDSLLNRVPFNSASETFFFENGSDRKTFLERVKAVVASAILMAYDPFTDADIVTRYAPDKPYTTIREIALKAEISIAETDHILDYPQSTLPNTKRVGGFSVSDAKPLPQDIKSFVERSSRGVAVVSFGGGDIKVPDHIKSKMATAFQKLDLNIVWKTNGGSEKEDNILALNWIPQNDLLGHPKTKVFISHCGTNGQYEALYHGVPILCLPIFGDQFYNANRIYVKGFGLHADIRDITAEKLTQLIQQVADDSKYRTNTQKASQIFKELHKIPSKEAAYWFDHVMKYGGDYMRSSGQQIPLYQFLLIDVIAFLLAVVIVFTLVVCLILRMCCRRLKKSKLKTA

SEQ ID NO: 8761 - protein, 512 aa, Diuraphis noxia
  MOD_RES (473)..(473): Any amino acid
MSFIKAKKNKMKSIVFAYAAVVFCALTIAQTRSSEILVIFPTTAQSHYRVVQPLIHRLLDRGHKILAITNFPDAVERANLSHINISRLKPHSKFNANNNGIIKSITRVIGNVYSYATILNHPTVAKLLKSGRKFDLVIAEFFTSTPIFAPIATVVDAPIVGFCPMIKFPWMNEVMGMETTVSYMPSVFSNFTDHMSFVQRVSNTVKLAIIGVSFNWIYTPIIREIIKNHYGIQTESTIKSMANLSLIMTNDYHSMFLPFPKPPGIVEVGGIHVVDEKPVPQDLNDFINDADHGVVLFSLGSVVSEASLGADKLRHILDAFSKLKQRVIMKFDAEKNKTIQLPVNVKMVKWLPQRDLLAHPKVLLFISHAGIMSVIETIHCGKPMVSIPIFGDQVFNTKLLIDKQVAVTIEYKHLESDGLLNAINEVLTEKYTINMKKLQQLYNDRPHSPLDTAVYWTEYVIRNKNESKELLKXQMVHLNLYQSKLLDIFAAFLLPLIAVYIIQRIMKRLRKQ

SEQ ID NO: 8762 - protein, 209 aa, Capitella teleta
GSLGSNLPSRVNKRLMAAFSRVPQRVVWAFPHDAPEETPANVLVLRWIPQNDLLGHNNTKLFITHCGANGQFEALYNAVPMIAMPLFGDQPYNALRAEYNGIGLQMNILEFTPDDLTKAIDRVIHGDYGRQIQRLSDIFRSRPLTPVQRSAYWIEHILEYGGDHLKSYALEMPWYEYLMLDILLFVLGIALIAVTLLACCLKSLCCGKK

SEQ ID NO: 8763 - protein, 366 aa, Asbolus verrucosus
NIPSPSHHIWNRALAFGLANKGHNITYIGPDEDELPKPQNYTHILLEGVYEGMNHNFDINEMSTYGPLAMIMEFENWCILQCQLNLKSKGFRKLLIYPPNFKFDLIVIDITAGTCLYPLIQRFNYPPTVGVTPFLLPTVWNFLYTHIDIGLRYFNQYAEEHELAKKIFGENTPSMQELERHISLVLANTDPVLDYPQPVPPNIIPVGGLHTRKSKQIPHDLQTVLDNAKNGVIIFSLGTNVRSDKLGKEMQTEILDAFSKIRETVIWKFESKIENLPKNVIVRKWLPQNDILGHPNVKLFIGHGGALSTQETIFHGVPMIAIPFIVDQHINTKLIVKKQIGVHVEFRHITSNYLLNKIREVLDNSV

SEQ ID NO: 8764 - protein, 484 aa, Otolemur garnettii
MAGQRVLLLVGFFYPGILLSEAAKILTVSTMGGSHYLLMDRVSQILQDHGHNVTMLNKRGNSLMSGIFENLLKVKEQLGFQCSHLLSRRDIMDSLENENFELVIIESFDYCPFLITEKLRKPFVSILTTSFAILDFGLPSPLSYVPVYSSLLTDHMDFWGRVRNFVTFFTFSRRQWQVQSMFDNTIKEHFPEGSRPVLSHLLLKAELWFVNSDFAFDFARPLLPNTVYVGGLMAKPTKPVPQDLENFIAKFGDSGFVLVTMGSMVNIDNFKEVLKELNSAFAHLPQGVIWRCKHSHWPKDVNVAPNVKLMEWLPQSDLLAHPRIRLFVTHGGQNSIMEAIQHGVPLVGIPVFGDQSENMVRVEAKKIGVSVELKELKAETLALKMKQIIEDKRYKSAAVAASLIRRSHPQSPAQRLVGWIDHILQTGGAAHLKPRAFQQPWHERHLLDVLGFLLGLTLGTLWLCGKLLGAACRWLPRARKLKET

SEQ ID NO: 8765 - protein, 401 aa, Camelus ferus
MGEQRVLLLVGFLLPGLLLSEAAKILTVSLLDGSHYFLLERVSQILQDHGHNVTMLVNTGPILDPDLKKKGKSFQVISWFLSEDDVNELRKRFHFFVTEALHGREALVNLVRIIEHLGTRCSYLLRSDIMDSLKNENFDLMVVEAFDFCSFLIAEKLEKRFVSVLPTPFGSADIGLPSAVSYVPVHFSYLTSPLDFWGRVQNFLLSFHFSMRQWQMHSAFDKTIKEHFPEGSRPVLSHLLKKAELWFVNSDFAFEYARPLLPNTVYIGGLLAKPIKPVPQELENFITKFGDSGFVLVALGSMVNDCQPDEVLKEMNAAFACLPQGVIWNYKASHWPKDIKLAANVKLMDWLPQNDLLGHPRICLFVTHGGMNSVMEAIQHGVPMVGIPILEDQHENMLRVE

SEQ ID NO: 8766 - protein, 523 aa, Chrysochloris asiatica
MAAQRALLLLGFLLFRGLLSEAAKILTVSLVGGSHYLLMDQVSQILQTHGHNVTLFQQQGLSLISDFKEEKKPYQVIKWLPPETFKEEFTKRFDLLVEEALHGRGTFEHFLKFMEQLGIQCSHLLRRKDIIDSLKDENFELLVLESFDYCPFLIAEKLGKTFVSILPSSFGTVDIGLPSPISYIPVYGSLLTDRMDFWGRMKNLKNFLAFSMKQRQIHSQYDNTLREHFPEGSRPVLSHLLLKAELWFVNSDFAFDFARPLLPNTVYIGGLMVKPIKSVPQDLETFIAKFGDSGFILVALGSMVNTYQTHEILKEMNSAFAHLPQGVIWRYKHSHWPKDVQLAANVKIVDWLPQSDLLAHPKIRLFVNHGGQNSIMEAIQHGVPMVGIPLFGDQPENLLRVEAKNFGVTVLLKQLKAETLTLKMKQVIEDKRYKSAAMAASVIRSSHPLSPSQRLVGWIDHILQTGDGAHLKPYAFQQSWYEQYLLDVFLFLLGITLPFMWLCGRLLCMVARWLCGSRKLKQT

SEQ ID NO: 8767 - protein, 523 aa, Nannospalax galili
MAGRCALVLAYLFLSGTLLSEAAKILTISTVGGSHYLLMDRVSQILQDHGHNVTMFHQGVNTLISGFKEEEKSYKFIKWIPPEDFQKEFNKYFDFFLEEALARRGTFEKFLKSVELLGFQCSHLLHRKDILDSLRNENFDLLVVETFDYCPFLIAEKLEKPFVSLLPSLPASVDIGLPSPISYVPVFHSLLTDRMDFWGLVKNLLMFFYYSTKQKKILSQYDSTIREHFAEGFRPVLSDLLQKAELWFINSDFALDFARPLLPNTVYVGGILAKPVKPIPQDLENFIAKFGDFGFVLVALGSLVSRYQTQEDLKEMNNAFAHFPQGVIWNCKGSLWPKDIKLAANVKIVDWLPQNDLLAHPSIRLFVTHGGINSIMETIQHGVPMVGIPVFGDQPENMVNVEAKNIGVSLPLMKLKEDTLALAMKQVIEDKRYKSAAMAARVIRHSHPLTPAQRLVGWIDHILQTGGAAHLKPYAFQQPWHEQYLLDVILFLLGLTLATLWLCGKVLGLVTRWLSRDRKVKKT

SEQ ID NO: 8768 - protein, 281 aa, Citrus unshiu
MSSSVATAAEAEIWIVPFFGQDIYFHALNYASKSLLVITNLPSSFLLTFPPPASSLPLIDVMMGSAAVECAMWQARIQDVKPGEARLLPGLPVDMALFESDLKHRPHGPPPGGPPPLRGAPGSEKIGPPEAGDQPHWMKEVEGSMALMFNTCDGLEGPFINYLANQLGKPVWGVGLLLPEQFYKSGGSMLRDHEMRTNRRSSNMTEDEIVQWLNLKSCGSVLYVSFGTEVDPTLDEYLVLANVLEASNRPFIWVDWILYVIWTNQQKTVIFVVVWIIKSVL

SEQ ID NO: 8769 - protein, 477 aa, Drosophila simulans
MRLGCAWLAFGLLLHLNLYLELGQAANILGVFPYRIPSPFQMVRPLIRALVERGHKVTMVTPADYPAEIDGVRHIRVPMLNQLMQTLMDNDHFVDALGDKWREGVLASTIFYNVSHAILSDNGVQMLMRDKSSRFDMIMVEASHLDALYGLAEFYNATLLGISCMHMTWHIDYLAGNLAPSVYEPVSPIGFALDSSLLSRWSNWIYITEEKLLESLVYRPAQVRLFKKFFGYPAEKLDELRARFSVILVNSHFSMGRVRANVPNIIEVAGVHLSEPPEPCGEELQKYLDEAEHGAIYFSMGQDILMKYLPENMQKQLLLVFFQIKQRVIWKSELSMLPNKSENVYVMDKVPQRMVLAHPNLRLFITHGGLQSVMEAIDNGVPMLGLPLFFDQFNNIHRVQLAGMAKGSANESSGHCTLVDGVRSTESGYFPYASQCGGDSSNAILQTRQHTNLWSSPWLRLCIADLSGLEIVPEESQ

SEQ ID NO: 8770 - protein, 330 aa, Nematostella vectensis
MLAFGIDTIPAYVPQLMSGLTRYMGLPERIKNLGFYFGSRFLMEWFIYPTYKLIKEKHGISPEKTVKESLSTVDLIIMPRDFILDHAQPIPPFVKVVGFFLPSPPKPLPAELEAFMQRSGDEGVILLSFGSMIEGLHNDTMLMMLKAFSQMPQNVLVKLDLNGLPKDSVPPNVRAVKWLPQNDVLGHSKTKLFITHAGANGLAESAYHGVPMICVPIFGDQFDNSQLAKDIGIAEMIKVNDMTADQFVSTLQRVLTQGRFKESSARISKAMKRRLRAPVAEAADLVEYVQALGHVDHLKPRGFSMPIYQLYMLDVLAVLVVAFISIVAVV

SEQ ID NO: 8771 - protein, 519 aa, Pogonomyrmex barbatus
MRVVTLVSLSILLFCTFQRSQEYNILGICPSSSYSHQQAFRALMKGLAARGHNITVISTIPLKDPPPNYENVDLSSSYIYMNCTGLRHMGKYEFTRYNMLGATYVCKHQLYTPAINQLLAKNKTFDAIIIEQLWYQCYYALVKHYNFPVLIGFLSVGNLPYVMDSVGNPDDPNFNPDMTYPFTDRMTINERIKNILYTTWTRLYYRFWHLPRAQDLANEKMPGTSVYDIDKNFSLVILSNNHVFGYPKPLLPHVIEVHSLHILEKPDPLPKDIREFLDNAQDGAIYFSLGSNLQTDQLPAGTLTTLCNALGSLKQRVLWKHDGNMAIHPTNIKFVKWVSQQAVLAHPKVIAYVMQGGLQSLQEAVHYSVPLVAIPFFGDQHFNARKILDAGIGLTLDIDTITENSIVQTLTEIVENKTYLNNIQTMSAIVRDELVKPIDKAVWHVEHVLKFPNSKHLQYRGHDVSWIDYYMPYLLFYLSCVTIFRGFIYLLYKYVIRNMLYKIVKYFRKNKQTANLKRD

SEQ ID NO: 8772 - protein, 358 aa, Lottia gigantea
MIGSYIFPGSSGGPPQTHTFPFLLSPYTPNMTLPHRVLNTLMTMGFYAVMQVIKWSSPFSKDNLRNYVPTEVLDVDVRDAARKSLLFMENNMDIMDYPKALYPNHIRVGGLTTRPASPLPQDLENFFSKSKNGVIVVSFGSTLRKSPKQFFERVVNIFKHFKQSVVMSYSENAEYGNVKTMSWLPQNDVLAHKNTVLFVSHCGKNGLNEGFYHAVPIVCMPFHGDQAGNGVKVKYLKIGDSINMLNSKDEDIIQTVQNVLNDKSFKANMNRLSAIYHDAKFTPRETAANALEHVLKFGGDHLRPVSSDFNFLAENMTDVWFIIFMFLCLFIYLFYRLVKCCCCCLCVKQKAVVKNKKE

SEQ ID NO: 8773 - protein, 550 aa, Homo sapiens
MAGQRVLLLVGFLLPGVLLSEAAKILTISTVGGSHYLLMDRVSQILQDHGHNVTMLNHKRGPFMPGLSDSPASASRYPRILYLQKYCQFGLKDFKKEEKSYQVISWLAPEDHQREFKKSFDFFLEETLGGRGKFENLLNVLEYLALQCSHFLNRKDIMDSLKNENFDMVIVETFDYCPFLIAEKLGKPFVAILSTSFGSLEFGLPIPLSYVPVFRSLLTDHMDFWGRVKNFLMFFSFCRRQQHMQSTFDNTIKEHFTEGSRPVLSHLLLKAELWFINSDFAFDFARPLLPNTVYVGGLMEKPIKPVPQDLENFIAKFGDSGFVLVTLGSMVNTCQNPEIFKEMNNAFAHLPQGVIWKCQCSHWPKDVHLAANVKIVDWLPQSDLLAHPSIRLFVTHGGQNSIMEAIQHGVPMVGIPLFGDQPENMVRVEAKKFGVSIQLKKLKAETLALKMKQIMEDKRYKSAAVAASVILRSHPLSPTQRLVGWIDHVLQTGGATHLKPYVFQQPWHEQYLLDVFVFLLGLTLGTLWLCGKLLGMAVWWLRGARKVKET

SEQ ID NO: 8774 - protein, 500 aa, Rhopalosiphum maidis
MKSISFAGVVFCALAISQQTWSSEILVIFPTTAQSHYRVIRPLIHSLLDRGHKILAITNFPDTVERANLSHIDITGLKPHSKFKTTGDYGIIKMISRISKNAHTYATILNHPPVVKLLQSGRKFDLVIAEFFTSTPIFAPIAAAVDAPIVGFCPMISFPWIHEVMGMETTMSYMPSLISASGNHMSFFQRISNTLNSVVIDIGFNWIYTRVIRDIIKHHYGIETESVIKSMANLSMIMTNNYHSVFLSYPTLPGIVEVGGIHVIDEKPVPQDLNDFINNADHGVILFSLGSIVSEESLGTDKLYNILDAFTKLKQRVIMKFDIEKRNIQLPVNVKVVKWFPQRDLLAHPKVLLFITHAGMMSVIETIHCGKPIVAIPIFGDQIFNSHLLVEKQVAVILEYKHLESDQLFNAINEALTEKYIINMKKLQQLYNDRPHSPLETAVYWTEYITRNKNESKELLKSQKIHLNLHQSYLIDVFTVLLLPLIIAIYITLWTMKRLR

SEQ ID NO: 8775 - protein, 523 aa, Cyphomyrmex costatus
MRIVTVVLLSISLFCTFQHSHGYNILGICPSASYSHQQSFQALMKALAFRGHKVTVLSTIPLKNAPPNYEDVDLSFSYIKKDCTGLRHVGAYAIFHQNLVEANLLCRHQLFSPAVDKLIASNKTFDAIIIEQLWYQCYYALVKHYNFPVLIGFLSVGNLPYVMDSVGNPDDPNFNPDMTYPFTDRMTINERIMNILYTTYTRLYYRYWHLLKAQRIANERTSGTSVYNIDKNFSLVILGNNHVFGYPKPLLPHVIEVHTCHTFQVSLNEIFINIIFQDVQEFLDNAQDGAIYFSLGSNLQTDQLPAGPLTALCNALGSLKQRVLWKHAGNMAIHATNIKFVKWVPQQAVLGHPKVVAYMMQGGLQSLQEAVHYAVPVVAIPFFGDQYFNARKILDAGIGLTLDIDTITENAIVQTLTEIVKNKTYLNNIKTMSAIVQDELMKPIDRAVWHVEHVLKFPNSRHLRYHGQDMSWIHYYATYLYLGTDFALLLYISYILYNKIVSPFVTYASNLKRWISNLKRKLD

SEQ ID NO: 8776 - protein, 514 aa, Trichechus manatus
  MOD_RES (200)..(200): Any amino acid
  MOD_RES (341)..(341): Any amino acid
MAAQQALFLFCLFLPGALLSEAAKILTASLMGGSHCLLMDQVSRILQDHGHNVTLFQQEGLSLLSGFLQGKKTYQVISWLPPEGFRKEFMKSFNFFVEEALHGRETFEQFLKLMELLGIQRSHLLRRRDIVDSLKNENFKLVVVGIFDYCPFLIAEKLGKSFVSILPSSFGTVDFGLPSPVSYIPTFHSLLTDRMDFWGXMKNLLMFFGFSRKQWQIHSRYDNTIKEHFPEGSSPLLSHLLRKAELQFVNSDFAFDFARPLLPNTVYVGVLMAKPIKPVLQDLESFIAKFGDSGFILVSVGSMLSTYQTQEIGKEMNSAFAHLPQGVIWRYECSHWPKDVXLAANVKIVDWFPQSDLLAHSSIRLLVTHGGQNSIMEAIQHGVPMVGISLFGDQPENLFRVEAKNLGVSIPINQLKAGTLALMMKQVIEDKRCKSAAMAASIIRRSHPLSPSQRLVGWIDHILQTGGGAHRKPSAFQQPWREWNLLDVFLFLLGITLGSIWLCGRLGHRVGPGS

SEQ ID NO: 8777 - protein, 480 aa, Trichoplax adhaerens
MTGRDIAKRKSSYLVVHVVFHFFPTLKILLGVNILILLSRYCWVLAFSSSLMNRYREKNKSVVTRYTTRKYPNSNLDSTANYLSPTFVNGVFDVSSFSAKKNNDVYLQPCHIHAGMDLATFSKERNLLENVKRQNCDGVLCDISSPICQIITEAANIKVLVAVAAFGFADPLVTGFCHIPNPLAYVPQLGLKFTNKMPLHQRIIKVVVSHLTSTLVHLFFLPYMFAEVNKTSLGIDSIPDLVYSRASFLLVNTDFTMDYPRPTSPTTKVTALKYATNVTMLFNTFSQLPYNVIWKYTEHIPQSIASNIKIIQWWSQKDLLGHSNTKALVTHCGLNNILEGAYHGVPMIGIPVVGDQASHGPKIAAKNVGVVLNVEETTQDDLYYAIINVTTRQDIIESTLRISKLIQNRPNSRTPVEEASDWMEYALNCNDGEYLRTEKYNISWHQFYLIDVFALVLVFLVIAVQLMRLIYVLYTSNIYV

SEQ ID NO: 8778 - protein, 512 aa, Nylanderia fulva
  MOD_RES (79)..(79): Any amino acid
MHVVTLVLLSVLLFHAFQYTHGYNILGICPSASYSHQQPFQALMKALAARGHRVTVASTIPLKNPPSNYENVDLSFSYXEKDCTGLRHMGAYTLLHKNMWEANELCREQLFSPAMDKLIAGNKTFDAIVIEQLWFQCYYALVKHYNFPVLMGFLSVGNLPYVMDSVGNPDDPNLNPDMAYPFTDKMTIVERIQNILYTTWTRLYYRYWHLPRAQYIANEWTPGVSVYDIDKNFSLVILGNNHVFGYPKPLLPHVIEVHSLQISEKSEPLPEDIREFLDNARDGAIYFSLGSNLQTHQLPAGPLTALCNALGSLKQRVLLKHDGYMAIHPTNVKFVKWAPQQAVLAHPKVMAYVMQGGLQSLQEAVHYSVPVVAIPFFGDQLFNARKILDAGIGLTLDIDTMTESFVVQTLREVVENKTYLDNIRTMSAIVQDELIKPMNKAVWNIEHVLKFSNLRHLRYHSHDMSWLDYYAPFLYLSGGLALSLYVSYILIMKNIGIFIKIRSTSYLKRKFD

SEQ ID NO: 8779 - protein, 221 aa, Homo sapiens [sequence omitted]

SEQ ID NO: 8780 - protein, 514 aa, Camponotus floridanus
MHVVTIVLLSILLFRAFQHIHGYNILGICPSASYSHQQPFQALMKALAARGHRITVASTIPLKNPPSNYENVDLSFSYRKKDCTGLRHMGAYTLLHKNMWEANELCREQLFSPAIDKLIAGNKTFDAIIIEQLWFQCYYVLVKHYNFPVLIGFLSVGNLPYVMDSVGNPDDPNLNPDMAYPFTNKMTIIERIQNILYTTWTRLYYRYWHLSRAQRIANEWTSGVSVYDIDKNFSLVILGNNHVFGYPKPLLPHVIEVHSLQISEKSEPLTEEIQEFLDNARDGAIYFSLGSNLQTHQLPAGPLTALCNALGSLKQRVLLKHDGYMAIHPTNVKFVKWAPQQAVLAHPRVMAYVMQGGLQSLQEAVHYSVPVVAIPFFGDQLFNARKILDAGIGLTLDIDTMTESTIVQTLREIVENKTYLNNIKTISAIVQDEAELIKPIERAVWNVEHVLKFPNSRHLRYHGRDMSWIDYYAIYLYLSGGFTLLFYIGYILNMKNISVFIKSRRINHLKPKFD

SEQ ID NO: 8781 - protein, 509 aa, Tribolium castaneum
MYKVFIFCLSVKCVLSANILYVSPIPSPSHHIWNRALALGLVNKGHSVTLIGPDKDKVHPKNYSHIYMEGIYEELDDSFDINEMGTYSPAQMMLEFESWSLFSCEKALKTQGLQKLLGYPADSFDLIIFDVTTGSCFYPLIQKFNYPPSIAVTAFLLPTYVAHNFGNHLYPSYIPWYGLQYTSEMSFVERVWNFIFTYADVVRRKISLYQKEHSMAKEIFGENIPSMEELERHISLVLANTDPILDFPQPVPPNIIPVGGLHTRKSKDLPQDILTVLDNAKHGIIVFSLGSNLRSDKLNKQTQNALLEAFSKIQETVIWKFESDIENLPKNVIVRKWLPQNDILGHPNVKLFIGHGGALSTQEALYHGVPMICVPFIVDQHINTRIIVNKNLGIHLDFKKITAGYVLQLLREVLDNPKYTENMKKISNIFRDRLETPLERGVFWVEYVLRHGGAQFLTTPARDFSYFKACSLDVIAFLFAIATVIVIIVCKMFALIMKACSSKKKIKVN

SEQ ID NO: 8782 - protein, 370 aa, Exaiptasia pallida
  MOD_RES (79)..(79): Any amino acid
  MOD_RES (333)..(333): Any amino acid
MLFADKALFGCGNLLKEKVGIPTIVDFSSWGFNDFNNWQNGISWHLSSIPADGIYNTREHGIPFLWRAANVLAYLLINXLGKAATRLVMGSLKSKHGIAPDKSFPQIISETDLVLMPIDWSIEWPRPVPPNVKVIGPTTPKQSKPLPEDLDTFMRSASKGIVLVSFGSMASSLDDTRSKILSEAFSMLQGYKVLWKYKKSFPDVKNLKIVSWVPQNDILGHSSLRLFMTHGGVNSVYEAAYHGVPMLITPLWGDQAGNAAKVKTAGFGESVNIRTGDNFTAEHIAVQMNRILDNPRYKTNAIKVSKLLQDRRQPSTEDAADWMEYVLKHNGTXHLRPNSTQLPFYQYFLLDVISFLLGVIFVLLFIVYKS

SEQ ID NO: 8783 - protein, 213 aa, Trichoplax adhaerens
MFAEVKKTSLGIDSIPDLVYSRALFLLVNTDFAMDYPRSITPTTKVVGPILPKPAQSLPSDLQQFASKNPNGTEIVSFGTVVTALKYVSNVAMLFNTFGRLPYNVIWKYTEDIPQSIASNIKIIQWLPQNDLLSHLNTKVLVTHCGLNSILEGAYHGVPMIGIPDVGDQASHGPKIAAKNVGIVLNVKGMTQDDLYYAIINVTTRQDILEKNS

SEQ ID NO: 8784 - protein, 516 aa, Tribolium castaneum
MKHFITFLVIFVGLLCKIQCAKILMVYQMPAHSHYSLGLRIAKELAERGHQVTIINPYPQKTPIKNFRDVSVEDHIEFIQAFKKSLFSRNSMSLFGNINFLIGLGAELTNRTLGHVNVQKLLRSGETFDLLIAEYFFNDAIIGLGHYFKIPVVLTAPNAVSGVNNNLFVNPTPASYVPHVLSPYNKHMNFWQRLHNWYIGLLSNLMKEFILMPRHCAIFKQHVSQDVELDETLGNVSLVFTNSHASVTDAVPHQPNMVEIGGYHVDPPKKLPGDLQQFLDGAKEGAILFSMGSNLKSRDLKPEVRSGILAAFSKIKQKVLWKFEVEFDDCPENVKIVNWVPQQDALAHPNIVAFISHGGLLSTIETVYHGVPIIGIPVFGDQPSNIAAAVANGYAVSIDLFELNEAKLSWALDEILNNPKYRENAKQRSKIMQDQPLKPIDAAIYWVEHVIRHQGAPHLRSAALDLAWYQREMMDIFAFLGLVAATLGVIICLIFKTMFERCCGKKRTIQSIKKNN

SEQ ID NO: 8785 - protein, 208 aa, Macaca fascicularis
MHSAFSHLPQGVIWKCQSSHWPKDVRLATNVKIVDWLPQSDLLAHPSIRLFVTHGGQNSVMEAIRHGVPMVGLPVNGDQHGNMVRVVAKNYGVSIQLNQVTADTLTLMLKQVIEDKRYKSAVAAASVILRSQPLSPAQRLVGWIDHILQTQGAAHLKPYAFQQPWHEQYLIDVFVFLLGLTLGTVWLCGKLLGVVVRWLRGARKVKKT

SEQ ID NO: 8786 - protein, 403 aa, Onthophagus taurus
MLFKIFLIINVHFVLAENILFVNLVPSPSHHIWNEALIEGVLKCYLPLIDHFNNQPAIGVTAFGLQTYLNDIIGESIQIYTPYYGLPYTDKMNLFQRFCSIFYTTIERLSRFYYLPKLDEINKKVFGENVRKINELGNEISLIFPNDDPILDYPKPNVPNVIQIGGVHLKEINQSATKIDENLEKILNNSVEGIVFVSLGSNFQPKFYKDHVKSAFIEAFSKLNLTVLWKFDDIVTSKNVIVKNWFPQSDILAHPNTKLFITHCGALSSQETIFRGIPIIGIPLFHDQYYRSAKFEEIEAGIILNYKEITANKLYESINEVLMNSRYKENMMKLSSLYKNQPLKPLDKFLMWFDYLLKNGDLRNLSVAGRKMSWYQTNNYDILGLIVVIVVVVKMLVNKLVFN

SEQ ID NO: 8787 - protein, 301 aa, Biomphalaria glabrata
MAYDPFTDADIVTRYAPDKPYTTIREIALKAEISIAETDHILDYPQSTLPNTKRVGGFSVSDAKPLPQDIKSFVESSSRGVAVVSFGGGDIKVPDHIKSKMATAFQKLDLNIVWKTNWSSEKEDNILALNWIPQNDLLGHPKTKVFISHCGTNGQYEALYHGVPILCLPIFGDQFYNANRIYVKGFGLYADIRVITAEKLTQLIQQVADDSKYRTNIQKASQIFKELHKVPSKEAAYWFDHVMKYGGDYMRSSGQQIPLYQFLLIDVIAFLLAVVIVFTLVVCLILRVCCRRLKKSKLKTA

SEQ ID NO: 8788 - protein, 523 aa, Bos mutus
MAGQQALLLFGFILPGLLFSEAAKILTVSLVGGSHFLLMHQISQILQDHGHNVTMLLQKGNLLLPGFKEEEKSYKVFNWFLPEDCNEEFKRSFHSFMEKNFGGRCKFEHFLNIMKLLGHHCSHLLRRKDVMKSLKNENFDLVIVEMFDYCPFLVAEKLGKPFVAILPSALGTVDFGLPSPLSYVPVFYSLLTDQMDFWGRVKNFLMFFEFFKKQWKIQSAYDDTIKEHFPDDSRPVLSHLLTKAELWFVNTDFAFDFARPLLPNTVCIGGLMSKPVKPVPQEFENFITKFGDSGFVLVSLGSMVSFIRSQEVLKEMNAAFAHLPQGVIWKYNPSHWPKDIKLAPNVKIVHWLPQNDLLGHPRIRLFVSHGGMNSIMEAIQHGVPMVGIPLFGNQHENLLRVKAKKFGVSIQLKQIKAETLALKMKQVIEDKRYKSAAEAASIIRRSQPLTPAQRLVGWIDHILQTGGAAHLKPHAFQQPWYEQYLLDVFLFLLVVTLGTMWLCGKLLGLVARWLCGARKLKKA

SEQ ID NO: 8789 - protein, 395 aa, Trichoplax adhaerens
YELIISDARAFSNDKKLLDELKNENFDAIVCDVSCYMCQVVAEYIDIKIQVDVSLFGFGDPLLARAFNIPSPLAYVRQVGLTSPYKMGLYHRTFNVILRLIVPFFIDQFMFNPMYAAINTTNLGLDSLPNYSIKRSTFLLVNSDFALENSRPITPTTKVVGPILPRPPAALPPNLQQFINSNNKGTIVVSFGSVFSALKFLTDIQIFFHSFDRLPYNVIWKYPDENRVNMDNSIKTVQWLPQNDLLGHPNVIAFVTHCGLNSVLEAAYHGVPMVAIPVAGDGYDHAQKILAKNIGVVLDVKTITSDEVFNAIMQVTTDKSIIASVKRVAKCIKNRPNNRTPVEEAVDWIEYALGNEGGHYLRTMEYTIPWYKLYLIDIFTIFFIALFIILKIFQF

SEQ ID NO: 8790 - protein, 468 aa, Saimiri boliviensis
MLLSSEKHLAADTKDKEKSYQVIRWFPEDYRKRIKERFNNYIEKALDGRKEYEGLVKLMEIFGTQCSYLLSRKDIMDSLNNENFDLVFVEGFDFCSFLIAEKLEKPFVAILPTSFGSLEFGLPSPLSYVPVFHSLLTDHMDFWGRVKNVLMFFSFCMIQRRIHSTFDNTIKEHFTEGSRPVLSHLLQKAELWFVNSDFAFDFARPLLPNTVYVGGLMEKPIKPVPQDLENFIANFGDAGFVLVAFGSTLDIYESQEVLKNMHAAFAHLPQGVIWKCQSSHWPKDVHLATNVKIMDWLPQSDLLAHPSIRLFVTHGGQNSIMEAIRHGVPMVGLPVNGDQHGNMVRVVAKNYGVVMQLNQVTADTLALKMKQVIEDKRYKSAVVAGSVILHSQPLSAKQRLVGWIDHILQTGGAAHLKPYAFQQPWHEQYLIDVFVFLLGLTLGIVWLCWKLLGMVARWLYGVRKVKMT

SEQ ID NO: 8791 - protein, 523 aa, Orycteropus afer
MTVQNALLLLCLLLRGALLSEAAKILTVSLVGGSHYLLMDQVSQILQDHGHNVTLFQQEGLSLIPDLKEEKKTYQVIHWLPPEDYRKEFMKHFNSFVEEVLHGRETFEKFLKLMEKFGIQCSHLLRRRDIMDSLKNENFELLIIETFDYCPYLIAEKLGKPLVSFLPGTFGTVDFGLPSPVSYVPAFNSLLTDRMDFWGRMKNLLMFFDFFRKQWQIRSQYDNTIKEHFPEGSRPVLSHLVRKTELWFVNSDFAFDFARPLLPNTVYVGGLMARPIKPVPQDLETFIAKFGDFGFILVALGSMLNTYQFQEILKEMNSAFAHLPQGVIWRYKCSQWPKDVQLAANVKIADWLPQSDLLAHPSIRLFVTHGGQNSIMEAIQHGVPMVGIPLFGDQPENLLRVEAKNLGITIQLKQLKAETFVLKMKQVIEDKRYKSAAMAASVIRRSHPVSPSQRLVGWINHILQTGGGAHLKPYAFQQPWYEQYLLDVFLFLLVATLGSIWFCGRLLRMVARCLCGSRKLKQT

SEQ ID NO: 8792 - protein, 542 aa, Vicugna pacos
MGEQRVLLLVGFLLPGLLLSEAAKILTVSLLDGSHYFLLEQVSQILQDHGHNVTMLVNTGPILDPDLKKKGKSFQVISWFLSEDDVNELRKHFEFFVTEALHGREALVNLVRIMEHLGTRCSYLLRSDIMDSLKNENFDLMVVEAFDFCSFLIAEKLEKHFVSVLPTPFGSADIGLPSAVSHVPVHFSYLTSPLDFWGRVQNFLLSFHFSMRQWQMHSAFDKTIKEHFPEGSRPVLSHLLKKAELWFVNSDFAFEYARPLLPNTVYIGGLLAKPIKPVPQELENFITKFGDSGFVLVALGSMVNDCQPDEVLKEMNAAFARLPQGVIWNYKTSHWPKDIKLAANVKLMDWLPQNDLLGHPRIRLFVTHGGMNSVMEAIQHGVPMVGIPILEDHCAPAPCLDGLQMLSLQKYQQHKSASATWTRAQTPASSLGMGPDLSPASTWGQPVADCAHSELPEAELPWPGASQKETAMAGSHPCHCQCTLTVGLFMVDPGSPAHTPSFSPYLTPAPSGCLRAPTPVLSPWVCPLKPSFGTQSLHAPAG

SEQ ID NO: 8793 - protein, 486 aa, Erinaceus europaeus
MAKKWASLLFLLQLYCCFSCGSSGKVLVWPMEYSHWINLKTILDELTERGHEVTVLTSSASILVDPSKQSAVKFEVFTTSFTKDKLDSIFMTLIKMWTYELPKSSLWAYGSRMQETYYEYSDTVQKLCEDAVSNKKLMKKLQEIGFDVVLGDAIAPCSELLSAILNIPLVYTLRYTTGNTYEKLCGKLPLPPSYVPVVISELSDKMTFMERVTNMLYFLYFDFAFETFNKKKWDRFFTEVLGRPTTLCELMGKADIWLIRTYWDFEFPHPYLPNFEYVGGLQCKPAKPLPKVIWRFDGKKPATLGPNTRLFKWIPQNDLLGHPKTKVFVTHGGGNGIYEAIYHGVPMVGLPMFVDQPDNIAHMEVKGTAVRLDLNTMTNTDFLNALKTVINDPSYKENAMKLSRIHHDQPVKPLDRAVFWIEFVMRHKGAKHLRPAAHDLTWVQYHSLDVIGFLLACVAATVYIITASCLFCFRKCTKSGKRKKND

SEQ ID NO: 8794 - protein, 489 aa, Saimiri boliviensis
MAGQCVLLLVGFLLPGVLLSEAAKILTISTVDFKKEEKSYQVISWLAPEDHLREFKKSFNFFLEETLCGREKFENLLNILDYLALQCSHFLRRRDIMDSLRNENFDMVVVETFDYCPFLIAEKLEKPFVAILPTSFSSLEFGLPSPLSYVPVFHSFLTDHMDFWGRVKNVLMFFSFCRRQWHKQSTFDNTIKEHFTEGSRPVLSHLLLKAELWFVNSDFAFDFARPLLPNTVYVGGLMEKPIKPVPQDLESFIAKFGDSGFVLVTLGSMVNTCQNREIFEEMNNAFAHVPQGVIWKCQCSHLPEDVHLAANVKIVDWLPQSDLLAHPSIRLFVTHGGQNSIMEAILHGVPMVGIPVFGDQPENMIRVEAKKFGVSIPLKKLKAETLALKMKQIMEDKRYKSAAVAASVILRSHPLSPAQRLVGWIDHVLQTGGAAHLKPYVFQQPWHEQYLLDVFVFLLGLTLGTLWLCRGLLRMAVWWLRGARKVKET

SEQ ID NO: 8795 - protein, 475 aa, Aethina tumida
MLKFIVLLAVCLSCVQCAKILAVFQMPSYSHQVVFQPIWKELSLRGHQVTVVTPLPLKDPTLKNLTEIDVSYLKVLGQKYNFLRTVSIDAWPHEKTKIMYQANYEFAEQVFENEQFKKIYQDPNAKFDLIIIQAYIGPIFHALGERFNAPVVGVNSMNAYIGQHFAIGNPHHPALYTDMYTEYQGELTFLERWYNTFFYLWARYFIHFEGMPKSDAIARKYLGNDIPYLGESVQKLSFLFTTTNPILYAPRPQVPTHVEIGRLHLKPPQPLPKDVKEYLDGAKEGVVYVSLGSNVLSSIVPDKFRNTLISALGKLPYKVLWKYEEDNLKDLPKNVVTKKWLQQQDVLAHPNVKAFVMQCGLQSLEETFSKNVPMICIPFISDQLMHIKRLVKYEASIGIDHKNTTDEEIKNAVLEIINNKKYKENVKKINDLWNDEPIKPLDKVMFWMEYVIRHNGTAHLRSPYADVPWYQFLVS

SEQ ID NO: 8796 - protein, 532 aa, Drosophila yakuba
MFPSGRWLVPIFWLISNWICWIRGSRILVIAPFDTYSQCMLVTPYIQALQDRGHQLTVIHAFKHCMPQIENVTFIRIWNNNNTYAEFEESMVIASASNKWEEISTISKVMANVTLNVLTNVEVRALMQSGITFDVVVLEAGYSDVLYGMAAHFNATLIGICTCVADWNINNLVGYTTSTLTEPIVPFGVKSMKNVWDRIYNWFYTSEEWLLMNLVFLPTQRLVHDHFFGHLEKSFLEIRQDFALMLLNQHFSLFRSRPNVPGMVEVAGLHIPKEDPQLPSDLQVFIDEAEHGVILFSLGLEQHINDLPMKTQVILVETFKSIPQRVIWKFDGESTVPLDSSIYHSSLLPQQAILAHPNVKLFITHCGIMSVIEAAYYATPVLGLPSFYDQFINLEVMKEEEAALELNINSLTVQELKDTVESLINQPKYRENALAISQRFRDQLMHPMDTAIYWTEYIIRYKGANHMKVSRSQLKLFEYYFLDNFIMVGMRLFLVVAIVFVVLSKSRRWLNHLSTKSFLPYAGIQNNKKAIS

SEQ ID NO: 8797 - protein, 485 aa, Ceratotherium simum
MDRVSQILQDHGHNVTLLLQRANLLISGFKEEEKSYQVITWLPPEDYNKEFMKFFDFFMEETLAGRDTFESFLKLMELLGLQCSHLLRRSDIMDSLKNENFDLVIVESFDFCPFLVAEKLGKPYVAVLPSSFGGVDFGPPRPLSYVPMLHSFLTDRMDFWGRLKNFLMFFGFSMKQWQIHSMFDNTIKEHFPEGSRPILSHLLKKAELWFVNSDFAFDFARPLLPNTVYVGGLTAKPVKAVPQEFENFIAKFGDSGFVLVSLGSMVSSSSSQEVLKEMNSAFAHLPQGVIWKCKPSLWPKDIKLAANVKIVDWLPQSDLLAHPHIRLFVTHGGINSIMETIQHGVPMVGIPIFGDQPENLFRVEAKKFGVSIQLKQIKAETLALKMKQVIEDKRYKSAAVAASIIRRSHPLTPAQRLVGWIDHILQTGGAVHLKPHAFQQPWHEQYLLDVFLFLLVVTVGTLWLCGKLLGMVARWLCGARKLKKA

SEQ ID NO: 8798 - protein, 530 aa, Nothobranchius furzeri
MSLHQVSGIFVLFSLSLVFFPQHCDGGNILVFPVDGSHWINMKILLEELHSRGHNISVIRASTSWYIPETSPLYTSITIDMDVGLESFFDKHIQDYMKAQRKGASMLTFLKLTKDFCSMIVDGHSLWRDAVIQLFENQNLVKSLKDSRYDLVLADPAMGPGVVLAKYLNLPLVLNVRWITSGEGHFVLAPSPLSYIPVPGSGLTDNMSFFQRVKNMLFYGLVLFQEKFLLQPIYDAMCDKYIERGCNIVSLLQEADIWLFRSDFVFDFPRPTMPNAVYIGGFQCKPAQPLPADLEDFVQSAGEHGVIIMSLGTLVKTLPREVVEEIATVFAKVPQKVIWKHNGERPSTLGNNTLIVDWMPQKDLLGHPQIKVFVAHGGTNGVQEAIYHGVPVLGIPLFFDQYDNLLRLQERGAAKIIHLADVNGDTFEEGIKEVLYKDSYRQNMHRLSRLHKDQPLAPMDKAVFWVEYVMHHKGAAHLRTEAYKMPWYSYYCLDIILFLITAMIVLILSVCAMVKRVCCKRKNKKKIKQK

SEQ ID NO: 8799 - protein, 522 aa, Dictyocaulus viviparus
MPFIVEFLLISLCSSSYALNILVWSSTMGQSHNNFLGNIADILEADGHNVTLLMVEFDPDFKNSTGTRLVKHVMRYTSPYYDPADWRTLTFKQGRVFNVKVGLNLVDFINIQIFAYRICKGIINDPTLIQTLHESRFDIGIYEMFHYCPAGVMELAGIPKTMLVSSMGIGYHHYRILGMEKQSSFVPASLTNSGSRMNFFDRLSNVITNGLSWVFANICEHFEQALFRNKFPEFPSLLNLIRERTDYFLMNTNEFTESTRPTLRSIHYIGGSAIANPIPLSDVYEKIVSKSIKGVILFSLGSLVKSSQMPVAVRQAFIDAFRSFMDYVIIWKDDELKNTTIANIHFYSWIPQVDLLADGRVKLFITHGGMNSIQEALLFGVPMITLPLFGDQDSNAAVAAERGFSITLNKLALTREIIIDAINTILGRGGGESVYTQRVRQAARLLKGSPQEMRQTIKKLARVSATEPLLSHLKLDIHHLNDLQYYNIDVYLSIFTIFSFITLSYWSFKQLVLCLFVSPKYD

SEQ ID NO: 8800 - protein, 523 aa, Ursus maritimus
MVGQRTLRLAAFLLSGFLLSEAAQILTISSLGGSHSLLMDQVSHLLQDHGHNVTMLLTGEQSLIPDIPQNDISYNVINWLSPEGHRKEFKEYFDFFMREALRGRETFDNFVKLMEQLGIRCNDLLRRGDIMGSLKNENFDLVFVDIYDFCSFLVTEKLGKQFVSILPTQFGSMDHGLPSPVSYVPVSRSLLTDHMDFWGRVKNFLMFFDFYMKQRQLQSTIDNTIKEHFPEGSRLVLSHLLKKAELWFINSDFALEFARPLLPNTVYVGGLLARPVKPVPPEFENFIAKFGDSGFVLVALGSMVNKYQSQEVLREMNSAFAHLSQGVIWKYNPSHWPKDIKLATNVKIVDWLPQNDLLAHPRIRLFVTHGGLNSIMEAIQHGVPMVGTPVFLEQVENLIRVEAKKFGVSIQLKQMKAETLALKMKEVIEDKRYKSAAVAASIIRRSHPLTPAQRLVGWIDHILQTGGAAHLKPRALQQPWHEQYLLDVVLFLLVVTLGTLWLCGKLLGMVARWVCGARKLKKA

SEQ ID NO: 8801 - protein, 537 aa, Caenorhabditis remanei
MKNTISFVFLLCVGLVSPFNYLVFCPLYAHSHHKFLAKIADTLSDAGHNVTFLAPIIIRKYENVKYLDSTKDIVYIQPSKKLESLGVTSDYSKFWNQDATAIQFVPAIRAFTKMFEQLYEDLKEDLTVLDELKNRKFDALVFEFLCPTALRELTFKNSNLKLLVSAIAEYLDIKAVLPSLSMTHHPLMSRLIGEPSSPSVLPSMISSFGDDMTFPERLQNTIGDIFFTLFVHFPPMTSFKNPEKLIDVEDMTARSPFMFMNGNPYLDYPRPLLTKSVLIGGISVNVTQLKQEKLSENYNQILSKNKKNVLISFGSMIFSKDMPQEYKDTIVRVIESRQDVTFIWKYEEEDVSFAKNLPNLYFSKWVPQTALLADSRISAFVTHAGLGSVTELSYMGKPAVLIPIFADQLRNSKTLARHNGSITLSKYDLSDFDKLRNAIDTILNEESFKINAERLSQQLQDQPVSPQDLLVRHAEFAAKYGELPNLDPCSRQMSFISFYMIDIILFFGVIIGSVVLGVVLITRWAFSFCVRPKQKVQ

SEQ ID NO: 8802 - protein, 511 aa, Tupaia chinensis
MAGQRTLLFLGFLLPAVQFSETAKILTLVTVGGSHYLLMDRVSQILQDHGHNVSMLLRRGNSLISDFKEGQKSYEVISWFPPEDNQKEFNKCFDFFMEEALNGRARFEHLIKFLEQFASQCSQLLKRRDIMDSLKNQDFDMVIVETFDYCPYLVAEKLGKPFVSVLPSSFNAVTFGLPSPVSYVPVFYSLLTDHMDFWGRVKNLLMFFKFSMRQRKIHSVFDNVIEEHFAAGSRPVMFHLLLKSELWFVNSDFALEFARPLLPNTIYVGGLMTKPVKPIPQDLEKFITRFGDSGFVLVALGSMVSTYETHKVLKEMNGAFARLPQGVIWRCGRSHWPKDIELAANVKVVEWLPQNDLLAHSSIRLFVTHGGQNSIMEAIQHGVPMVGIPLFGDQPENMVRVEARKLGVSLQLKELKADTLALKMKQVIEDKRRSHPVSPSQKLVGWIDHILQTGGAAHLKPYAFQQPWHEQYLLDVFLFLLGLTLVAGWLCGKLLAMAARWLSGPRKLKET

SEQ ID NO: 8803 - protein, 528 aa, Equus przewalskii
MVPFLGGGTGSQQGTSMMRPRVLLLICFLLPGLLPSEAAKILTVSLVGGSHHLLMDRVSQILQDHGHNVTVLLQEGNVLIAGFKEEEKSYQIVTWFPPEDDFKEFLKFCEFFMEEALAGRDKFENFLKFMELLGLQCSHLLKRNDIMDSLKNENFDLLFVEGFDLCSLLVAEKLGKPFVSIISTSFGFIDFGLPSPLSYVPVFDSLLSDRMDFWDRVRNFLKFFDFSMKKWQIHSTFDNTIKEHFPEGSRPVLSHLLKKAELSLVNSDFAFDFARPLLPNTVYVGGLMAKPVKAVPPEFENFIAKFGDSGFILVALGSVVNIFQSQYVFKEMNRAFAHLPQGVIWKCNPSHWPEDIKLAENVKIVDWLPQSDLLAHPRIRLFVTHGGINSIMEAIQHGVPMVGIPFFGDQPENLFRVEAKNFGVSIQVKQIKAETLALKMKQVIEDKRYKSAAVAASIIRRSHPLTPAQRLVGWTNHILQTGGAAHLKPHAFQQPWYEQYLLDVFLFLLVLTVGTMWLCGKLLGMVAR

SEQ ID NO: 8804 - protein, 528 aa, Oryzias latipes
MYRVCGGLACFSLCLIFLVPSCSGGNILVYPVDGSHWINMKILLEELHARGHNITVIRVSTSWYIKEKSPIYSSITLEMEEALEDFFDVFVKEQIKVQREGASMLSFFKLNKDFLSMLTQAHVLWCDVTKDIFENEDLAKQITDSKYDVVLTDPAIGGGLVLAKYFNLPVVLNVRWIPVGEGHFVLAPSPLSYIPVPGSGLTDRMDFIQRLKNIFFNCITKFQELFLVGPIYDDICSKYIEGGCSIVSLLQQADIWLFRSDFVFDFPRPTMPNVVYIGGFQCKPAEPLPADLEKFVQSSGEHGVIIMTLGTLVNALPQDVANEIAEVFSKMPQKVIWKHKGDRPSTLGNNTLIVDWMPQKDLLGHPQVKVFVAHGGTNGVQEAIYHGVPVLGIPLFFDQYDNLLRLQERGAGKILQLADLNGRNFEEGLKEVLHNSSYRQNIQRLSRLHKDKPMSPMDQAIFWIEYVIRHKGARHLISEAYKMPWYSYHSLDVVLLLLAVGAVLLYSIYGVFRFLCCRRKIKTKTKLN

SEQ ID NO: 8805 - protein, 530 aa, Orycteropus afer
  MOD_RES (361)..(361): Any amino acid
MAAQRVLLLFCFLLPGPLLSEAAKILTASLLGGSHYLLMHQVSWILQDHGHNVTLLRTEVISLIPVLWGRQTVKCRIHIDLKIRTIINIHGTLFKTNKAIPWGNKTVIHKKANFDNILQFMGQLGIQCSHLLRRRDIMDSLKNENFDLLIVESFDCYTFLIAEKLEKPFVSFLPASFGFQDLRLPSPMSYVPVVYSLLTDRMDFWGQMKNLLMFFDFSRKQWQMYSQYDSTIKEHFPEGSRPVFSHLVQKAELWFVNSDFAFEFAQPLLPSTVYVGGLMAKPVKPIPQDLESFIAKFGESDFIFVSLGFMLNFYKNQELLKEMNNAFAHLPQGVIWKYKCSHWPKDVQLAANVKIVDWLPXSDLLAHPSIHLFVTHGGQNSIMEAIQHGVPMVGIPLFGDQPENLVRVEAKNFGVAIQLKQLKEETFALKMKQVIENKRYKSAAMAASVIRRSYPLNPSQWLVGWIDHILQTCGGAHLKPYAFQQLWYEQYLLDVFLFLLMVTLGSIWLCGRLLCMVARCLCGSRKVKQM

SEQ ID NO: 8806 - protein, 410 aa, Bison bison
MELLGHHCSHLLRRKDVMKSLKSENFDLVIVEMFDYCPFLVAEKLGKPFVAILPSALGTVDFGLPSPLSYVPVFYSLLTDQMDFWGRVKNFLMFFEFFKKQWKIQSAYDDTIKEHFPDDSRPVLSHLLTKAELWFVNTDFAFDFARPLLPNTVCIGGLMSKPVKPVPQEFENFITKFGDSGFVLVSLGSMVSFIRSQEVLKEMNAAFAHLPQGVIWKYNPSHWPKDIKLAPNMKIVHWLPLNDLLGHPCIRLFVSHGGMNSIMEAIQHGVPMVGIPLFGDQHENLLRVKAKKFGVSIQLKQIKAETLALKMKQVIEDKRYKSAAEAASIIRRSQPLTPAQRLVGWIDHILQTGGAAHLKPHAFQQPWYEQYLLDVFLFLLVVTLGTMWLCGKLLGLVARWLCGARKLKKA

SEQ ID NO: 8807 - protein, 219 aa, Diuraphis noxia
  MOD_RES (192)..(192): Any amino acid
MSSVPSNILSAFKEAFAELPQRVLLKYEGEMKDKPKNVMTRKWFPQRDVLLHKNVKLFVSHGGISGLYEAVDAGIPVLGFPLFGDQYRNIDNLVEAGMAISMELYSITKDNFLKNVLDLVDNKKYINNAKIASEIFKDRPMSPEKSVVYWTEYIIRHKGAPHLKSQALNLTWYQYFLLDIITVLLMFIFISXLIVLKLLKCIRTIFTNICSSFSKIKCD

SEQ ID NO: 8808 - protein, 429 aa, Plutella xylostella
MTLKLLILFLGAANSANILCVFPTPSYSHHTVFKKYVATLSESGHNVTVITPFEYNDCHNCLVPSYMFQKLTTSVVVADETTVTKTNYMSLINLITQQMKSENVTSLLNNKDTKFDLVVAEAYLEMLLMFSHFYQAPVIQMSSGHALPENFETMGAVSRNAVKHPNLWRSSHNIDYENKLQREWKLIEHAQDNVARKQFNSRPLKILRENVKLLLVNVPTIMDNYRSVPQTVQYLGGLHLNSTTIEPLDDELKRFADKGKFIYVSFGATKDLRNFDILSKMSRTFSNCKYNVLWKSRSYFNISENIMTRDWLPQRSVLKHGNLKLFITQGGVQSIDEAIDNTVPMLVVPTMGDQFFNAKRIVDLGIGKKGDLFNTGLMGRQINKIIDNYDLFKDNLKIVKRLINDKPMSSTHASLWYTNYVLRNKDLKR

SEQ ID NO: 8809 - protein, 520 aa, Miniopterus natalensis
MTGQALLLLPLLHWLQLLEGAKILTLSLYGGSHYLLMDRASQILQDHGHNVTFLQHNEFHVVSGFKKEKTYQSVLWTPPGDYHQEFKKNLEFCIKEAFLGRRPVMNLLKLVKLHATQCSHLLRRTDIMGPLKNESFDLVVVDGTDSCTFLIAEKLARPFVSILGTTFGVTSFGLPEPVSYVPAFYSSLTDHMDFWGRMTNLLMFFISTLRDWYTLAQFDGTIREHFPEGARPELFHLQRKAELWFVNSDFAFDFAQPLLPNTVYIGGLLDKPVEQIPQEFENFIAQFGDKGFIIVALGSLVNIVQYPEVLKEMNSAFAQLPQGVIWKCSPSLWPKDIKLAANVKIVDWLPQSDLLAHPSIRLFVTHGGLNSVMESIQHGVPMVGIPLFADQPGNIIRVEAKNLGVSILTEELKADTLALKMKQVIREKRYKSAVLAASIIKRSHPLTPAQRLVGWIDHILQTGGAAHLKPHAFQQPWYEQYLLDVFLFLLVVTLGTMWLCGKLLGLVVRRLCGARKLKKA

SEQ ID NO: 8810 - protein, 408 aa, Homo sapiens
MDSLKNENFDMVIVETFDYCPFLIAEKLGKPFVAILSTSFGSLEFGLPIPLSYVPVFRSLLTDHMDFWGRVKNFLMFFSFCRRQQHMQSTFDNTIKEHFTEGSRPVLSHLLLKAELWFINSDFAFDFARPLLPNTVYVGGLMEKPIKPVPQYKNDDKAVLKKSLGMDLENFIAKFGDSGFVLVTLGSMVNTCQNPEIFKEMNNAFAHLPQGVIWKCQCSHWPKDVHLAANVKIVDWLPQSDLLAHPSIRLFVTHGGQNSIMEAIQHGVPMVGIPLFGDQPENMVRVEAKKFGVSIQLKKLKAETLALKMKQIMEDKRYKSAAVAASVILRSHPLSPTQRLVGWIDHVLQTGGATHLKPYVFQQPWHEQYLLDVFVFLLGLTLGTLWLCGKLLGMAVWWLRGARKVKET

SEQ ID NO: 8811 - protein, 323 aa, Callithrix jacchus
MEIFGTQCSYLLSRKDIMDSLNNENVDLVFVEGFDFCSFLIAEKLEKPFVAILPASFGSLEFGLPSPLSYVPVFYSLLTDRMDFWGRVKNVFMFFRFSTMQRCLHSTFDNTIKEHFTEGSRPVLSHLLRKAELWFVNSDFAFDFARPLLPNTVYVGGLMEKPIKPVPQDLENFIANFGDAGFVLVAFGSTLDIYESQEVLKNMHSAFAQLPQGVIWKCQSSRWPKDVHLATNVKIMDWLPQSDLLAHPSIRLFVTHGGQNSIMEAIRHGVPMVGLPVNGDQHGNMVRVVAKNYGVVMQLNQVTADTLALKMKQVIEDKRYVAL

SEQ ID NO: 8812 - protein, 523 aa, Equus przewalskii
MARPQALLLICSLLPGLLLSEAGKILTLSLVGGSHHLLMDRVSQILQDHGHNVTVLLQRANLLLAGFKEEEKSYQAITWLPPEDYNKEFKKYFDFFLKEALAGRDTFENFLKYMELQGLQCSHLLKRNDIMDSLENENFDLLFVDAFGLCSPLVAEKLGKPFVSVLPTTFGYMDFGLPSPLSYVPVFNSLLSDRMGFWGRVKNFLMFFDFSVKQWQTHSTFDNIIKEHFPEGSRPVLSHLLKKAELWFVNTDFAFDFAQPLLPNTVYVGGLMAKPVKAVPQEFENFIAKFGDSGFVLVALGSLISNYSSHELLKEMNSAFAHLPQGVIWRCKPSHWPKDISLAANVKIVDWLPQSDLLAHPRIRLFVTHGGLNSIMEAIQHGVPMVGIPLFGDQPENLFRIEAKKFGVSIQVKQIKAETLALKMKQVIEDKRYKSTAVAASIIRRSHPLTPSQRLVGWTNHILQTGGAAHLKPYSFQQSWYQQYLLDVFLFLLVVTLGTMWLCGKLLGMVARWLCGARKLKKA

SEQ ID NO: 8813 - protein, 525 aa, Physeter catodon
  MOD_RES (197)..(197): Any amino acid
  MOD_RES (200)..(200): Any amino acid
  MOD_RES (397)..(397): Any amino acid
  MOD_RES (401)..(401): Any amino acid
  MOD_RES (480)..(480): Any amino acid
MAGQHVLLLVGFLLPGLLLSEAAKILTLSLVGGSHSLLMNRVSQILQDHGCNVTLLLQRGNLLLPGFKEEEKSYKVINWFLPEDYNKEFKKSFHFFMEETFEGRSTFEHILAILEQLGLQCSHLLRRNDTMNSLKNENFDLVIVEIFNYCPFLVAEKLGKPFVSILPSSFGSVDFGPPSPLSYVPVFYSLLTDHMDXWGXVKNFLMFFDFSVKQWQIHSMYDNTIKEHFPEGSRPVLSHLLKKAELWFVNSDFAFEFALPPLPNTVYVGGLMAKPVKSVPQVKYENFITKFGDSGFVLVVLGSVVSIIQSQEILKEMKAAFARLPLGVIWKCKPSHWPRDIKLVANVKIVDWLPQNDLLGHPHVHLFVTHGGINSVMEAIQHGVSMVEIPLFGDQPXNLLXVEAKNFGVSIQLKQIKAETLALNMKQVIEDKRQKSAMVDTSIMKRSHPLTPSQQLVGWIDHILQTGGGAAHLKPHTFQXPWYEQYLLDIFSFLLVVTLGTSWLCGQLLGLVAGWLCGTRKLKKP

SEQ ID NO: 8814 - protein, 514 aa, Trichoplax adhaerens
MVVGLWLVMNAIACVQLSSAAKIAIGASFYHSHTQVLAAIGEELHKRGHSVTVITSTANHFVAGRGYNILFYETPVTQHDIGSCTAVALKKNDVFITTCMKHLIDDNKAYMNDDSLLQQIRAEKFDAIVCDIACYPCHVVSEAAEIPIQIDVSTLGFVDPFVSIPFHIPAPLAYLPRMGLVATNKMNLYQRTINVVISPLIMTFLDNFIFDSLYKVVNKSKLGLQAVPKFIDTRATFLIVNGDFAIDYPRPLTPTSKMVGPVLPKPPKSLPPHLEEFITSNPNGTIVVSFGTVVTAVKYVIDIQVLFMAFSLLPYNVIWKYTEEVPKQLLTSNIKIVKWLPQNDLLGHANVKAFVTHCGLNSILEGAYHGKPMLGMPVVGDQIAHAQKIIAKGVGVVLDIKSATVKEIHNSIVKITTDKQILDNAAQVSKLIKNRPNGRTPVEEAGDWVEFALNCDGGNYLRTEEYNLSWYQLYLLDVYAVIAIMLFIFVKLLNLVWMGFAWLCCRKGNKLKES

SEQ ID NO: 8815 - protein, 520 aa, Octodon degus
MARQELLLLVCFFLPQILVSEGAKILTVSQLGASHYILMDKVSSILQDHGHQVTKLLNKEATIPDLKEEEKPYKVIDWVLPEKNRNEILKHIHSLVEVLDGRDVFDVILKLWEHMGTSCSYLLHRDDIMNSLRNESFDLVFLDATDLCAFLIAEKLEKPFVVLLSMFHYVDFGLPSPLSYVPVYGSFLTDQMDFWGRVRNFLMSFVFYVKQWQMHSTFDNVIKEHFPEGSRPVFSHLLQKAELWFINCDFGFDFARPLLPNTVYIGGLLEKPIKPIPQDLENFINKFNDTGFILVALGSFISRFQTQTVLKEMNKAFANLSQGVIWKCDHSLWPKDIKLAQNVKMVNWLPQNDLLAHPSIRLFVTHCGMNSIMETIQHGVPIVGIPVFFDQPDNMVRVEAKKFGVSLQYNMLTAETLILKIKEVIEDKRYKSAAVAASIIHWSQPLTPTQRLVGWIDHILQTGGAAHLKPYAFQQPWYEQYLLDVFLFLLGLILCTLWLCRRLLGIVTWWLSGSRKLKKT

SEQ ID NO: 8816 - protein, 391 aa, Bactrocera dorsalis
MISLKSIAAALWILACVTNYVESAKILAVFPFPGPSQYICVQSYLKTLAARGHEVTSVSAFPQKTPLKNFRDITIHIDQSHHDEAVINAIEQIAVGKLAELQFAKEYTSLTSLLVFNNEDFQQLLHSDEQFDLIIIEVFYLDALYALGKHFNAPTIGVSSYGADIVIDELVDNVSPLAYVPAPSGMNMDRMNFWQRLDNLYANTMELLYTHLEIIPEQQRYYEKYFPNATLRLADVRRDFSLLLLNQHYSFSWPRPLVPNAIEVAGMHIENKPKKLPTDMEAFINASSRGAIYFSFGSNVKSASLPKQKLQEIMNVFASLPVNVLWKFEKTDLAGIPKNVFINKWFPQSDVLAHPKVKLFVTHGGMHSLIEAVHHAKPIVGTPFPWLLVCD

SEQ ID NO: 8817 - protein, 524 aa, Diachasma alloeum
MGFKIFGSIISIFLISCAIESASHRILAIFPFQSRSHQMMFDALIKGLVDRGHQMDVMTVYPMKKPLKNYTVVVNLEGKQESLVNQWNVKFASELGDDTLPIIALPFGNGLCEYLGLPEMQAIIKNPPQDPPYDLVIVESFGANCFIGLGHVLNVPVIMASSTVPLPWLETSLGQVQYPAFVPAFFTSHKHPMSFFDRVLNTVKTYSNNIRYRYYTEAVQNAQMRKYIDSDIPPLRELEKNVVLALVNSWHSLNPIQPVTPGVIGVAGLHVDANYVPLPKEMEKWMNDSTSGVIYFTLGSMVNIETFPDETMRAIYSVFRGIAPVRVLMKVANKTALLPGLPDNVMTSSWIPQVAVLAHKNTKMFITHGGLMGTQEALTYGVPLIGIPLFGDQHNNIVDYHSLGMAIELDIHNLSEESISWAVNEILHNPKYREAAKHQSMRFLDRPMSAMDTAVYWVEYAIRHGRGALRSPVVDLSWWQVALLDVYGFLSLSILLAIYLIFRIAKASLTAVTSTKNGKRVKSD

SEQ ID NO: 8818 - protein, 536 aa, Caenorhabditis elegans
MNFQYYIIFILFSIIDYSNSYKVLVFNPAFGASHSNFLGKISDILIDAGHDVTMLIPIAMQGKKHLVGSKKVKNIIRIDQDPRSIELYKQTGAEDVLRKKIWKVESDIALFFKMAGNFSKTCGYQCQHVFQQTEILEKLKNEHFELGITESLFICGYPLFDHLGVKTIINADSVLFMDIVKCTLGEPSSSTFYPALISPMTDKMTLVERIKNAIQMLIPVYFSKMRFEEELSMIEPYYNGSKTWEELLENVAFNMVNSNRYLDYASPTLPKTVFIGGMQVKTKKQGTPKLNKEWDDLLNIRKENVLVSFGSNAFSSEMPDEFKKSFLDVFASMPEITFIWKYEQENSTIAMHLSNVKMTTWMPQSDLLADNRLSLFVTHGGLGSSIELAYQGTPAVVIPLMADQPRNAHMLTRHGGAIQLDKTNLDNPQMIRDAIKTILDNDSYTENARKLAQILEDQPYTPAEVVLKHCDFAVKFGVLDTLQSEGRKLNVFQFYSYDILVVVCFLIITVVVFIVLYVFQCIKICSTIFSKKVKNE

SEQ ID NO: 8819 - protein, 457 aa, Aedes albopictus
MVSPYPLQSPLENYRHITIPMPDWSKGAMKNLMRDQSQWSMVKTFPEMNRIALESANNSIHHPEVHKIIKEEKFDLLVVGLMADFLLGVSNWIGAPTVVVNPNAAMPLVNEMVGNPYPIAAVPNTMRGMLNPMGFTGRMQNLLISFLEDAFNWYMKHTSEQFYDSIFPRGQFPSYDEVRRNVSLVLINQHFTKTSPRPYVQAMVEVGGLQIKQTPDPLPEDLRKWTDEAEDGFILFSLGTNLLSSTIPKEKLDALINTFARLKQRVIWKWDVEHMPNKPANILLKKWLPQDDLLAHKNCRLFVMHGGLGGVAEALFHGVPLLGMPFFGDQQANTLAVEKEGWAVIVQFADLTEETFSSAMDEVLINSSYTEKAKQLSSLYRDRPQSAMDTAVFWTEYVMRHKGAPHMRYPGVDLNFFQLHMLDLFAVIFVTLYIAIKVISLACSRICRRKPSKLKVR

SEQ ID NO: 8820 - protein, 532 aa, Lingula anatina
MLSVIATLILIVPQFIDGHTIGAIIYPGKGQFVKAQNLLKELKARGNEVYIIVGDNVEIEDLHDPEINLLQFKSRETHGYFEAADWQRGHTLSVLSQSPGVKQTGIFDMVNTFSNLTEHLFNYTEDMLKDEALYRHLEDVLTMDLMLMYGYPFWPSAYVFPYRHGIPYVTLTTTQLHLYAGVPVSIMPSYVPNQGFKWSSKMNFFERVFNFCLQTILPAIVLPDIPKQFCEEHVRNKQPRTFKEFLRGSELWLLTGNNFVMEDPLPSLPNVVFMGGMDTRPAKALPDDWDNFMNQAPYGVIIVSFGSISFQLTNEIYKKFYMAFRGIPYRVVWKYKGDLPLRDVPNDIRLEEWIPQNDLLGHWNTKLFIGHGGNEGQYECMYHGIPMINFPVYGDEIHNAERVQSKGFGLTMDIATFTPEELIDNIDEMMSNDSYRAAIKTASAIFRDFPLTPQQTAAYWIEHVTKFGSSHLHSVAEYLPWYQYFMLDVIGFLFAVAFIVCFVISNFVFYYYYKYCARRTLYMPLSPDKKNN

SEQ ID NO: 8821 - protein, 530 aa, Stomoxys calcitrans
MANKSVWLYLAFLGLSFQVLDAARILAFFSPVSYSNMLTYSAVTEALAQAGHNLTIFSNYANPNSYTTNKYPDHYQYIHLEGQALYDGRRLVNNTKGHYMVWFKVIDERLECAHSTLNHPKMLNFLAEHQAGDFDVVLVGHTMMDFLFGLGTHFQCPIISVTLLRPPYATNRLLGNPAEVSYYPRLTRVAWKAPLKFWQKVLNFVDYTVERYVLQPYINGINEEMYRYNFPPDRYPPLEEVYKNVSLVLTNHHFSQGPIRPNVPALLEIGGIQIKEQPDPLPEDLAKIMDSAKHGIIYFSLGTNVQGSNLSKEKAKMIFNVLSSLPQTVLMKWGDKDFPGEAANIIYKSWLPQDDILAHPNVKLFITHGGQGSVVESQYHGVPMVGIPFFGDQHSNMANVEKSGFGIGLKYATLNENELRASVLEVLNNPKYRENVQRFSKLYRDRPMSPRQLVSYWVDYVIRHKGAKHMQSPAVHMSWWELHSLDVIGFLVAVLTGVVWLLVFLVKLLCCRGRKASASKAVKNEKKKKA

SEQ ID NO: 8822 - protein, 428 aa, Unknown
  Description of Unknown: Mycobacterium tuberculosis H37Ra sequence
MEETSVAGDPGPDAGTSTAPNAAPEPVARRQRILFVGEAATLAHVVRPFVLARSLDPSRYEVHFACDPRFNKLLGPLPFPHHPIHTVPSEEVLLKIAQGRLFYNTRTLRKYIAADRKILNEIAPDVVVGDNRLSLSVSARLAGIPYIAIANAYWSPQARRRFPLPDVPWTRFFGVRPVSILYRLYRPLIFALYCLPLNWLRRKHGLSSLGWDLCRIFTDGDYTLYADVPELVPTYNLPANHRYLGPVLWSPDVKPPTWWHSLPTDRPIIYATLGSSGGKNLLQVVLNALADLPVTVIAATAGRNHLKNVPANAFVADYLPGEAAAARSAVVLCNGGSPTTQQALAAGVPVIGLPSNMDQHLNMEALERAGAGVLLRTERLNTEGVAAAVKQVLSGAEFRQAARRLAEAFGPDFAGFPQHIESALRLVC

SEQ ID NO: 8823 - protein, 477 aa, Diaporthe ampelina
MSPPLILYAIPPREGHMRPALQISSHLVSRGLDVTILGDARWSPAITAIGAHASPIIGLWGAMEDYTKWGDIIRAQTAEERLRVSLSDGFVRLLPSGLESVRHALAGIRDRLGGGGDALRGRTVVVLSDTCFSGTLPLKLGTDLPRGYEGVIVRTVGIGLVPRFWAAPERPPWGSGLPHDVTEDGISRNLEAHAAKWDQAAEDRARWLLGAMNCSKSVDELYEEYDKGSTAIKRPFWDASTVCHDVVLQMGLPSFEFPVPNEPAHLKFAGSLPPKPIPSDLVYPDWYSEVLQNSSSSAAKPGRKKIVFVAQGTEVLDHRDLLIPCVKGLAGREDILVVAVLCQKGATIDKHLSLFEGGRLPDNARVIDYFPYDAILPHADVFASNSGYGGLTHAVAQAVPVVQAGDVFDKPDIGRRVEYSGLGVFLANSPPTPEAVAAAVDEALGQDKYKKRALSLQAESRGYDPLEIIESEIRALP

SEQ ID NO: 8824 - protein, 205 aa, Plutella xylostella
MLPLQTKILSKWEDDTLTNIPKNVILRKWFPQIEVVAHPNVKLFIGHGGLISLLETINAGVPILGIPVFADQYLNIHSTIQNGNGAMLEHKNINEHNLRTILNKMLIEKRYKEKALEISTRFKDRPMNGLDTAIWWIEYVIRHKGADFIKTPALKFNFLQYYMLDVLLLVLAVALAPLLVVWKIVSLFKSKPVKKNVEKKKQKRN

SEQ ID NO: 8825 - protein, 500 aa, Drosophila guanche
MNRSPVRSILLLMLGICSTAQVESHHILGLFVNVHRSQLLVHMAVARALLQRGHQLTVVTTLPLAEVQLQGNVTHIVVPWEQPVDEVQPGSTSDWLLRLQRMFNRLEQSGDLLDQPAWKDFLKLSPKPHFDLLLLGYHFNDHLLGVAAHFNCPTVIVSTQQPIGFVNSLMGNPEERWYVPQPYDSRQRSGISAWLFGVWEKLMEMVARRVLQKIYSLHFPEPHYPPLETMRRSVVLALNNHHMISEGPIAPLLPSMIDMGGILLEQKLNETLPAIARNRSLIIFSLGTRFSWQRSPGHLVETFTEAFAQFPDYDIYWTYDGPNASEMMSYHSHLKLAKWWPQRHLLGQQQARLFITHGGKGSVTEALYYGVPMLGLPLLGDQRSNLQKMEAKGWGLTLSMQNVSHVELAKAMGRILSDSHYSASISTASHLYRDRPMSASDVATYWLEYVVRHRGAKHLYSPARQLNFVQYHSLDVYALVYGGLLLLIGIFSRINQWGFL

SEQ ID NO: 8826 - protein, 522 aa, Culex quinquefasciatus
MRLLVVFGVLLMGGFSQGSRILAVFPSTSKTNYIFGQVLFEELAARGHQITVISPFEVQYDSEHVTQIKLTGMFTHLEDYGMNTNIFTKWDRSSFYGNSHLIYGTAAMADYTLGHPKVQELLKSDETFDLLLLDQVLSDSLLGLAYHYQIPAIVYSSTAPNKFINEMVANPHNPAYNPISSLGYSDRMTFRERLWNTFVSICEQFNYKYLYLPSQEAVFQRHFARKYLPPLLDLIHNVSLVLVNSHPVITYPRPLVPSMVEIGGLHLRQFDETGLSQDVINWLEAAKNGAIYFSLGANTKSTDLPDNVRRAFTGAFGQLSGTLILMKWENATLENQSSNVIIGPWMPQQQLLAHPNVRLHITHGGLMSMMESVQYGKPILGIPLAGDQEILVDRAVSAGYGLKLDYQNISQEIVLESIKRIMEESSFRENALRVSRQFREQPMKPMDKAVYYIEAVAKDGGAGVDVLRSGALILTFWERHLVDVALCFVAIFLVPVVLVAALIQVILRKTHRGKVDAKKKTN

SEQ ID NO: 8827 - protein, 216 aa, Rhagoletis zephyria
MDSDPSTWAEWTELRRNWHQSTTFNDLIEEAGYPRYPNDSYPQNSILTVYACPEELNYGPLRALPWFNLEVFNPPKDEGLKPLTELGVPQSFLSDDIGGRFSGHLIYASLGSMGSVDLDLMERLISALSTSPHKYIISTGPRHEQLLGGKPLPANMWGGPFLPQTSIIPHVEIVITHGGNNSVTETFAAGKPMLCLPLFGDQFDNAQRLLETGYGR

SEQ ID NO: 8828 - protein, 517 aa, Caenorhabditis briggsae
MTQNLNILIVNPIFGFSHVKFLSTLADIIAERGHNVTVLQPFHIAMNNLDGLIKDKSVKIMNYYPDNFSELEKNEEQTFKMAWDSKLMQNPILGALFSGMVAKQFKNTVIKMLRDEKLHKELSSYNFDAVLVETFEISGFYLAESLQIPAIAVLSAVRYPVFDELFGQSSTLGYIPATGSSLPPKAGFFSRLNDVYNTFFLSIGQKAMNNAQYNVIKEAIGRKPTAWQDLVQRSPVYIVNANPYLNFAVARPGNVVQIGGITMLKKGTLKKIELPEEYEKILNERESSVFISFGSVVRAYEMPENFKKGILKMFELLPDVTFIFKYEDELEEDMNSRIPKNVYLKKWVPQPALLLDDRLKVFVTHGGLGSTMEVAHSGKPALMVPLFADQFENAQMLARHGGAVDYNKFDLANGKKMAKVLKEMISNPSYQKNAQELQKVLLNQPINPKENFIQHLEFACKFPTWQSQTPGISRSGFIPYYYLDVILFLIATPATLIGAFTYLMTRSFSYQLVESYT

SEQ ID NO: 8829 - protein, 510 aa, Aedes aegypti
MNSLFRIAFVFGTVLSLTSAYRILSINVSPSRSHIIVQEALVKELARRGHHVTMVSPYPLQTPLDNYRHITVSIPDWRKGTMKNLMQDQSPWAMVKTFPEMNRIALEAANNSIHHPEVQRIIKEEKFDLLMVGLLADFLLGVSNWIGAPTVVVNPNVAMAIVNEMVGNPSPLATVPNAMRGMTSPMNFIGRMKNLFITTMEYAFGWYMKHTSEQYYNSNFPRGKFPSYDEVRRNVSLVLINQHFSKTSPRPYVQSMVEVGGLQVKQTADPLPEDLQKWTDEAEDGFILFSLGTNLLSSSIPKDKLDALINTFARLKQRVIWKWDTEHMPNKPANIVLKKWLPQNDLLAHKNCRLFVMHGGLGGVAEALFHGVPLLGMPFFGDQQANTLAVEKEGWAVIVQFSDLTEATFSTAVNEILTNSSYTERAKQLSNLYRDRPQSAMDTAVFWTEYVIRHKGAQHMRYPGADLNFFQTQMLDVIAVIGVGLYVIIRVLCLTCKCICRRKQHKLKTK

SEQ ID NO: 8830 - protein, 592 aa, Anopheles darlingi
MRHLILLSLAFLAIVAFSDGYKILFLAPFPGPSHWLMMKHFISELAGRGHEVTCITAFQYGEPAPPNYTEVYIDPPYPIRKTFPVEALFAASQSSDFEKLYMYWDLGVNTSRHGLESDPVRQFIARRDLTFDLIIAEQFFQESWLMFAHQYDAPIVTISTYGYSDFFDRIMGLRTPLSFVPHMIFSYEDDMSTSERLHNLYISMYDAYYRQNYYLPKQNRIAQKAFADWASETGRKLPDIVNLEKSISVILVNSHPVLNRPRPTIRGLVDIGGAHIRPVQPLDPQLRVFIEGADEHGVIYFSLGAYMQSAVMPADKRQAILNVFGSLPQRVIWKFEDESLQKKAPPNVLIRKWAPQNDILAQPQVRLFISHGGQFGTFEAMKHGVPTLFFPFFADQQRNADRAILAGFAERMNFADITEQTFAYKIRRMLENDQYREKARHIATLFNDTLVDPMESAIYWIEYVARYRGAQHLKSHAVKLTWLQYHMYDMVIYPLLLSYIIYILYGQKLRRMRKYLPIVSAICVTLFFLYNMYDMIMYFVLLLCPLYNDYWPKFKRSRTYLHVVCVICALFYLQGYEPIEPIRKYLLLSKLS

SEQ ID NO: 8831 - protein, 497 aa, Drosophila mojavensis
MNCLLRYPLLLLAYWIAAGVHGSRILCLSVGVHRSQLLVHLAVARVLLQRGHQLTLVTSQPLERDWLTANVTHLLLPWQLPREQVIEPHANFLTRLQWTLERLEKSGELLDQPEWREFMEHTPSTPYDLLLLGYHFNDHLLGVAAHFNCPVAIITTQQPIGFVHSLMGNPEERWYVPQPYDSRQRTGLEGYIFGLWEKLSELLARRVMQRIYSTHFPSPQYPSFEEMRRRVILALNNHHMVSEGPIGPLLPNMLDIGGIVMEQMERKELNLPRRPFIVFSLGTRFSWLTMPGKVEKAFVDAFAQLRDYDIYWTYDGANASTIHLANSHVHLEDWWPQAQLLAHPLARLFITHGGKGSLSEALYYGVPMLGLPLLGDQRPNLRKMQNKGWGLSLDIHNVSQAELLCSIKRLLNEKQFRESIRRSSLLYRDRPLNASDLAAYWLEYVIRHKGAPHLSGNARHLNFWQRHLLDVRLAVYGPLGMLGWLALWLNRKLNCNR

SEQ ID NO: 8832 - protein, 1025 aa, Danaus plexippus
MKLQIIFSLVFLASFTQALRLLVFFPMMSKSHSILGQGMVSRLLEAGHEVVHVTAFPRDKPQANLTEINLIEASNRMKEQFQGDDNFKLKNLIGKENIGDSVFFVYMTYEISKNIIEDQTFIKFLLNPNEKFDAVIIEWFFSDIFAGIAPLFKCPLIWFGSTEAHWQILQVVDEIPNPSYSVDIFSVSKPPLNFMERLRELYRIAKKYIFISLLSTPFERSLYNSVFSDIANKRGVTLPSYDEVIYNASLLLINSHPSIGTPFRLPQNAKYIAGYHIDREVKPLPKDLQKLMDEAKHGVIYFSMGSNLKSEDMSESMKKSLLAMFSKLKQTVIWKFESDLDKVPANVHLVKWAPQQSILAHPNLKFFMTHGGQLSTTEAIHFAVPVIGIPVAADQHVNMRSVANKGFGIYIKITEDITDDLYPAIQEMLQNPSYKSKAKELSFIYHNRPLTPGDELVFWTEHVVHTRGALHLRSPALQLPFYQKFFLDLLILILVAIVLCVLMISKCTMYYTCLLLFIKLYLCHAYKVLVVFPIPWKSHYILGEATVWHLVKAGHEVTYLTPSPIENAPKGLRQIDISASSRFFPKGRFDIVSLINKKGRLMTQEQKIRTTHDYLVKSLELDNVQNFIKDSNEQYDVVVVEWLHTETMAGFASLFSCPLIWVSTMEAHTLVLSLIDEHLNPNYNVLFYSTNFSRTLWNRAKQLWSLTKILFYTWYRQNRENEDFKNIFGSAILKRGRELPYFRDVKYNASLMFGNSDVVTGDAISLPQNYIHIGGYHIKEPIEPSPSFDLKGLMDESSNGVIYFSLGSSLNITRIPRYLKKGILKSLGEVDQTVILKMDHIPEDQPKNVHTVPWAPQQYILAHPNCKLFITHGGQLSIIETLYFGIPIIGIPLFADQYNNVNRAVAKGFGKQIDFNSNTPEVLKNTIKEMMTNSSYRATAKHLSSLFIRSPTPGQRLVKSVELVARTGGAQHLRSVALNVPLYQKLYLDLILVFIIGVLGFLFVITYLYHFVTNIRRPKTLKKKD

SEQ ID NO: 8833 - protein, 524 aa, Diachasma alloeum
MKIGFFVSIIIIFVITFATRNEAYRILAIFPLQSRSHHMLFDALIEALAEKGHQMDVMTVYPLKKPLKNYKVVVNLERVAKHVVNQWSIEYASKLGDDVLPTLTTVYGNELCEYLALPEMQEIIKNPPQDPPYDLVILEAFMSNCFIGVGHALNVPVIMVSSPLPYPWLEISLGQPQFTAFVPSRNTNYQYPMSFFVRVLNTIRSHYDYMRFNYYTEAVQNAKMRKYIDPDIPPLRELEKNVALALVNTWHSLNGIQPLTPGIIEVAGLHMEANYVPLPKEMEKWMNDSASGVIYFTLGSLVNIETFPDATIRAFYSVFRGIAPVRVLMKVANKTALLPGLPDNVMTSSWIPQVAVLAHKNTKMFITHGGLMSTQEALIYGVPLVGIPFFGDQHSNIIDYHSLGMALELNNHNLSEKAISWAVNEVLHNSKYREAAKRQSFKFLDRPMSAKDTAVYWVEYAIRHGPDALRSPLVDMPWWQVALLDVYGFLSICILASVYLIIRLARALLRAVTPTTHGKRMKSD

SEQ ID NO: 8834 - protein, 533 aa, Caenorhabditis remanei
MLLLLIFSILFTPVSPLNILVYSPAYAGSHSNFLGKLADTLTERGHNVTYLMPVVMVGKRDECIGVKLTKDIVIVEAGEETLSQQKGDSTNDGNMKAYWEATMNSSNARAIGGWFNIAMKSACRHLHSQRDVFKQMKAKSFDVAILEPISVCGLGYVKALGIEKTILATSFTFFDFVLPHIGEPLDYSSVPGAFGASGEVMSMAERYENWLVTKEMNLGQEDMFEGEMKAYREFSGKDLPDWRELLPSASLFFVNSNPFLDFPRQVIQKTIPIGGITINLEWIKAQKLSADWVEILEKRPHSMLISFGSMIKSSHMPEQWRNGLLNAIKSMPNVTFIWKYESDDISFAEGVENLHFSKWVPQTALLNDPRLTAFVSHGGVGSTLELAYSGKPTIMIPIFADQIRNANMLARHHGIIHLNKRSMENFEVTRKAFHDILFDDSYKVNARKLAELLADQPYSPKDNVIKYTEFVGKHGPFPAMDPYGRHMNTFQKNFVDIYALFALFYVLCTALILAILRSIYLKFGSSKSSTKLE

SEQ ID NO: 8835 - protein, 507 aa, Capitella teleta
MRLLFLICCLIEGTTSVKILLMPVNHGSHARFFSLVGQTLQEEGHVVHVLLGDNFRHHSEERGLRVVSMGMDLKYVLEAVHEKLFDSSKWGMWQLLKAMKDKGSAYCEAALSQGVPYEVLEAEKYDLVLIDNIDPGRCMYVVPYRLNVPYISLGARHDPWSARVPALPSSEGQIIVSTLSANSTFRERLLNTVASLAFWVLFPPSFAVDPSYLKRFAPNRPETTFDQIYQDSEMWIINMDTMCSDWPRVHAFHYQFIAGLGWTPAKPLPAGDMQSFADGADNGLIVVSFGSALKTIPKEMMHVLMDALRDLPQRVLMRFDGEHPANTPANVMLTSWLPQNDLLGHNNTRLFVTHGGNNGQLEGLFHGVPMLTLPVFGDQFYNARRASLRGHGLSLDLNSSSAEQVRDAITELLSDPKYRKSVQRCSRILLDMPEPRKALSFWVNHVLKFGGSHLKPSSMQLPLWKFFMLDVAAFLAVSAAIVSACIFMCCRCTAKRCCRRQSKSKQD

SEQ ID NO: 8836 - protein, 536 aa, Toxocara canis
FQIISTRSSMSFTSCLQLLCVYSFANAANILIYSPSYSKSHLISNGRIADVLSNAGHNVVMLIPEYERTKFNGTKHAKVIRIANVYDDYADEIEEFAAAFFKQQTITIRTKLKWSRKSAVVCEAVLRRKDVLDHLRSFKFDVAFSEQIEVCGLGLIRYLGIQNHIWVSSCSLTVPTTYTLGVPTPLSYVPVVEESGLGSDMSFTERAYNMFLWLQEVCVHRYAAHLQTQVFRKMDPEFPHLNDVAADSALCFVNNDEFLDLARPILHKIIYVGGIGIPLHSSPLAQSFESLMSKGKNGVVLMSFGTLVPSSSIPMEIRVDILRVFAEFIDYHFLIRADDDDNDTRQLLIDMNIHNIDLVGWIPQSDMLGHGRLRLFIMHGGLNGMLEAVIRGVPLLVIPFFGDQYHNAKAAQARGIGLSLEKYELDYAHLKGALKELLGNEKYHKAARRLSAVIRNKPNKPEEQLVKWTEFVAKYGSLPELQVEGAKLNFIKYFGIDIFAVVLFLLFTPLMTLIFLIKRTIAIFCKRGVDLTKKTE

SEQ ID NO: 8837 - protein, 449 aa, Unknown
  Description of Unknown: Mycobacterium tuberculosis H37Ra sequence
MRVSCVYATASRWGGPPVASEVRGDAAISTTPDAAPGLAARRRRILFVAEAVTLAHVVRPFALAQSLDPSRYEVHFACDPRYNQLLGPLPFRHHAIHTIPSERFFGNLTQGRFYAMRTLRKYVEADLRVLDEIAPDLVVGDLRISLSVSARLAGIPYIAIANAYWSPYAQRRFPLPDVIWTRLFGVRLVKLLYRLERPLLFALQCMPLNWVRRRHGLSSLGWNLCRIFTDGDHTLYADVPELMPTYDLPANHEYLGPVLWSPAGKPPTWWDSLPTDRPIVYATLGTSGGRNLLQLVLNALAELPVTVIAATAGRSDLKTVPANAFVADYLPGEAAAARSAVVVCNGGSLTTQQALVAGVPVIGVAGNLDQHLNMEAVERAGAGVLLRTERLKSQRVAGAVMQVISRSEYRQAAARLADAFGRDRVGFPQHVENALRLMPENRPRTWLAS

SEQ ID NO: 8838 - protein, 519 aa, Aedes aegypti
MKFKFWNFWCAVVSLVVIPTALAENILILQTLASRSHHIWNKQIFERLFNNGHNLTILSFEEEQSVPGKTFLIVKDLMAKLMADFEGDLDYTAEQSPVANIHFMYDFYNKASRLLVKEDAVRQLLAYPKTFKFDLIIHDLTMGQFLLGFVEYFGNPPLISITAFNIPPHVTTMTDAPLYTTYMPHYASSFDNKMVFIERVRNTLYWAFDLFYRNRIYMANEDKRVKQIFGGNATSVKLIEKRSDVVLVNSDFSMDYYQVLPPNVIPVGGLHVGRQEKVPPVVKQFIARANKGVILLSFGTNVASEMLGEGTNLDMFKVFRSMPDYGFIWKHGNPEELGIMPANVLVLKWVPQAAILANSRTKLLISHGGLLSLQEATWHGVPVLAIPFFVDQYSNAEKIVKAGAGVKLLPKNINEDTFKGAIKDVLENTSYYENMKQRSYLFKAQPEHPLDRAIFWIEKVLENKGLHYLRSPTPTMNIFQIYAIDMVASVLVIAFLYYLIIRRHIRRPATSDNVKPKKE

SEQ ID NO: 8839 - protein, 521 aa, Halyomorpha halys
MYLTGILSLAGTLLFASSRVVSSHRILAFLPFNGKTHHIIYRPILEALADAGHNITYVTPISPSEKHPKINYILIDDCYPGFNSKFFFENSKRTFYYLQVNAVYGITTAGLEKVYNQPNVKNLIESSETFDAVITETCFFQEANAALHHRFNAVGIEICCLGERSWINSVAGLPDNTAYMIDYRSPYTDNMNLLERIHNAYITLSISLSSLFYLHRMEQVAKRSLKYHGSEDRPPLDHILANISMILVNSHPALSYPYPTSPHVKKIAGVVINKKTKPLPEHLQNFLDNAEHGVIYMSLGTNLAIVSESTEFGDVASTFMKVFGNLKQRVVMKWDSDYPKDQVPANVIMSSWFPQQQILAHNRTKLFISHGGYSSLYESAYYGVPIIGIPYFGDQPKNILAAVVAGYCVRVNYDNVSEDSLTWAIKELLNNKRYKAEAERRSALLRDTRTSPVDDAVFWIEHSIKFPNALTPRSAYMSFVVLNLIDVKFILLIIIFSMYYVARRFIISNNLKVPTNKVKSS

SEQ ID NO: 8840 - protein, 415 aa, Sulfuricella denitrificans
MQSRNKPVILLVAEAVTLAHFARIATLAKALDPAVYEVVVASDPRYTDLEAPLGFAFHPIRSISTAEFAQALARGKPLYSVETLTQYVEDDLALLDSVKPDLVVGDFRLSLAVSAPLRRIPYASVVNAYWSPFADTAYPVPDLSMTRILGVRLAQKLFDAARPMAFALHARPLNRVRRHYGLPSLGSDLRNVYTWGDYTLYADIPEVVPTRRLPAQHRYLGPILWSTHTPLPEWWSRLPEDRPIVFLTLGSSGQADLLPMALTALSKLPVTVIAATAGNIALADVPANAYITNYLPMDIATRRAQLVISNGGSLTTYQAFASGVPVIGLCSNMDQLLNMGATERLGAGIMLRAGKASSASILEAAIAILNNPSYAQAANRVGRILVQTDAAQRFRDVVEEMLRQRSNPSSDQPQK

SEQ ID NO: 8841 - protein, 432 aa, Xylophilus sp.
MHFAFIAPPFTSHVRALEALAAVLLARGHRVSWLHQADVGGVVRDRRIDFHAVGAATHPPGGLAALVSRAARPGGPLGLRRVIHDVAAGTDMLCREAPAVLQRLGVDAIVADQMEAAGGLLADGLGIPFVSVACALPVNRDPRVPLPVMPWGYAADERGEHLNEGSARVYDWLMTPHAKVIRHHAARFGLKDRHTLSDCLSTRAQISQTTAGFEFPRSAPEPYFHHVGPLRGALAEEPPLDLALDPTRPFVFASLGTLQGGRYPLFKRIAQACRAEGLQLLVAHCDRLGPRDAAALLRHGATAVTGFAPQRSALDRADVVVTHAGLNTALDALEAGTPQLALPIAFDQPGVAARIVHAGTGLRVLPPLAGVGALRRTLRRLLDEPSFGERSRALGDEIGVSGGAAQAADITEAALAPRSAAASHEARSPAHA

SEQ ID NO: 8842 - protein, 522 aa, Caenorhabditis brenneri
MILKHFIPLIIFLIPTITTYNILVYSPSIGSSHTNFMARIADTLTDAGHDVTFLVPIVGEAKIDHLGVKSTKDVVTVELDHKIEEKPADADVKQYWRAEIDSENVKTLFTSFGDSLIRSCQRFLQRKDIFEEMKSRNFDVGIFEPLTICGVGFMHALGIRKTIIASSCVFLDPVLEAMGEPLDYSQVPGLLAKFDGDMTFWDKVENYKLSMAYQEWTWKIFDEESKMHKKFLGDSIPDWRELVSSSSLHFTNSIPYVNFPRTVTQKTIPIGGIQVDFDGIKSEKLADDWEEVLEKRTKNVLISFGSAMRSMDLPEEWRAGLLGAIKSQPNTTFIWKYESDDVSFAAGVSNIHFSKWVPQTSLLNDPRLTAFITHGGLGSTNELSHLGVPAIMIPVAADQTRNSNMLARHGGVIVLRKQDLGDPAKIEKAVKDILFDENYGENSKKLADLLRNQPLKPKEQVVRYVEFVAQFGPFPKMDLGGQGNFLSIYFVIYLPYLIFVLLFVLVLIRSLCSIKRTKEKMN

SEQ ID NO: 8843 - protein, 531 aa, Stomoxys calcitrans
MNNQRLRGIVCMLLIIVSCSFIHRVDTSRILGVFTTPPISHLLIHMAVAETLANDGHDVTVIAVNPNPLKKSKVKYIHIEEPSFNQEYAKAMVNNPDSKIYVKIAQAASVITDMANVTLHNPKMFGFLRDHKAGDFDLLIFGYFLNDFLLGLGGHFQCPIVVSFMLQPIFLLNPMIGNPAEASNVPNLFTGYKQPLNFWQRVDNFLYTTFEYQVFAPIMAWKMEEMYRYNFPPDRYPPLEEVYKNVSLVLTNHHFSQGPIRPNVPALLEIGGIQIKEQPDPLPEDLAKIMDSAKHGIIYFSLGTNVQGSNLSKEKAKMIFNVLSSLPQTVLMKWGDKDFPGEAANIIYKSWLPQDDILAHPNVKLFITHGGQGSVVESQYHGVPMVGIPFFGDQHSNMANVEKSGFGIGLKYATLNENELRASVLEVLNNPKYRENVQRFSKLYRDRPMSPRQLVSYWVDYVIRHKGAKHMQSPAVHMSWWELHSLDVIGFLVAVLTGVVWLLVFLVKLLCCRGRKASASKAVKNEKKKKA

SEQ ID NO: 8844 - protein, 541 aa, Caenorhabditis brenneri
MLPPKIIFFFSIFSIFHSVHALNILVYSPAFAGSHSNFLGKLADTLTEKGHNVTYLMPVVMVGKRDECIGVNLTKDVVIVEAGEKTREQQKGDVTNDGNLQAYWHAHMTSSNARELGKWFNEALISSCKHFHQQKDVFNQMKSKNFDVAILEPISVCGLGYVKALGIEKVILASSFVFFDAILPYIGEPLDFSSVPGAFCSSGEKMTMSERYENWLVTKEMNAGQEYTFEGEMAAYRKYSGENLPDWRELLPAASLFFVNSNPFLDFPRQVLQKTIPIGGISINSEWIKAQKLTSDWEKILEKRPHNMLISFGSMIKSSHMPEKWRNGLLQAIRQMPDVTFIWKFESDDVSFAKDTPNINFSKWVPQTALLNDPRLTAFVSHGGLGSTMEIAYSGKPSILIPIFADQIRNANMLARHNGVIHLKKDYMEDVKATKKAFEDILFDEKYKKNAEKLADILRSQPYSPKDNVIKYTEFLGEHGPFPFMDPYGRHLNYFQRNFLDIYTIWGIIYFSAAIVILFSLTRIYCMVRSLFGGKTTEKIE

SEQ ID NO: 8845 - protein, 527 aa, Zeugodacus cucurbitae
MFLPVRLLLITLILSPCAYGTYNILFMGPFPAPSHWMFMEHFLEQLLQRGHHVTTLTNQPAKQQHANLTEIIIEPPLDLVYYHPKANMFKMQFTSDFENLHLYWESGLTSTEYALNQTEVKSLIASKDLHFDLVVLEQFFHESLLMFAHKFKCPVVTLGTLGYADNMDHAMGLLTPWSFVPHLFLSDIYRMNFYQRAYNTFLSFYDVVVRHWYYLPRMQAMAERHFNDYIEGPLPHVNVLVQNISLMLINSHRSLDAPRPSMPGLVSVGGVHIKPVKPLPTELQRYLDNSKHGVIYFSLGTYIHSTDMPKGHIKILLNAFAQLKQNVLWKYENATLGTDLPSNVRISKWLPQNEILAHPNTKLIITHGGIFSTQEGVYWGIPLLFIPIFGDQHRNARKAVQAGYACSLLFDKLTSEDLVQNAQQLMKEPLYKRKALEASQLFRDNPIQPLEEATYWLEYVLRHRGAPHLKSHSAYMPLYQYLLLDVLGCTLLLLLLIILLFVVIVKVLKSCMAEKLKARNARRKKQN

SEQ ID NO: 8846 - protein, 526 aa, Haemonchus contortus
MKQFIVFLLTISLCSTDAYKFLVYSPIYGYSHTNFMGALADTLTEAGHNVTILLPIMDEGQQNKTGVKLTTKIIKVPADPRSRAMFGSVDDILSKMWTMEPSIFGLLQMAKNMTTSFVNQCQNLVNDDELMKQLADEKFDVGISETVQICGLGIFEYLKIPASIGVFSAVHMDCLSAGIGEPIMPSYVPGGMATNGDRMNFFERFKNLVSVMVGGRFFSSVFVEEIEVFRAKVGPHFKGYEELLADISYAFTNSNPYIDFPRPMLHKTIPIGGIAVATDSKKNVLSKEWNDILNRRNTTVLVSFGSMAKSVLMPDKYKKTLLEVFESMPETTFIWKYEEESSKVAAHLENVHLSTWLPQNALLADPRLSVFITHGGLGSTTELAHMGKPALLIPLFSDQTRNAHMLTKHGGGIVLKKDDLENPQKLRDSLKDILSNVSYARNAKRLAEMLINQPISAKQLFIKHSEFAAKFGRLPNLDPYGRQLSFFQYFLIDIFLVVIAALAVSIYIVVRILRKIYSVRTKSKKD

SEQ ID NO: 8847 - protein, 415 aa, Rubrivivax gelatinosus
MHEGRRSPTRKPRILFIAEAATLAHVVRSVVLATTLDAGRYEVGFATARDFRAHAEAAGLAVRELYSIGTRAYLDAVSAGRPVYPYATLERYVEDDLRVIAEFEPDLIVGDFRLSLAVSARLAKTPYLAISNAYWSPLADAPYEAPVHAATRMFGPRIVGTAFDALRPLIIAQHAWPMRRLRRRHGMPSLGLDLRAVFTEGDTTLFADVPAMVPTAAAASAARYRYIGPVVWSPPAPLPEGLDGEDGRPLVYVSLGSSGDPAALGLVVDAVVACGARAVVAAPSGWTHRHGDAVVARSVLPGSELAARAKVVVCNGGSPGSHQALEQGTPVLGIPANLDQLLNMRYLVRSGAGLSVRADELSPASLQASLRRLLSEPAFGDRARAVQREFAHYPARELFPAVVDTMLGPASGART

SEQ ID NO: 8848 - protein, 538 aa, Caenorhabditis briggsae
MISLQHIFSILFIFPIAVSSLNILVYSPAFAGSHSNFLGKIADTLTEKGHNVTFLVPVVMIGKRDECVNGVKLTKDVVVVEAGPETLSQQSGDINNDENLKAFWKAHMDSSNARSSTTWFNIAMKFACRHFHSQRDVFEQMKAKNFDVAILEPISVCGLGYMKALGIEKTVLASSFTFFDVVLPYTGEELDYSSTPGAFGSFGEKMTMWERYENWMVNKEVNMAQEDMYEGEMEAYRELSGKTLPDWRELLPSASLFFVNSNSFLDFPRQVLQKTIPIGGITMNQKWIKEQKLSEDWEKILEQRPHTILISFGSMIKSMYMPKEWRNGLLETVRSMPNVTFIWKYESDDVAFASGLSNLHFSKWVPQTALLNDPRLSAFVSHGGVGSALELAYSGKPTIMIPIFADQIRNANMLARHQGVIHLNKNDMENFRKTQKAFNDILYEESYTRNARKLADVLATQPYSPKDNVIKYTEFVGKHGPFPAMEPHGRHLNYFQRHFLDIYAVFALFYTTIAVIVAAVVWCIYRKCVKCLKVEKIE

SEQ ID NO: 8849 - protein, 222 aa, Vanessa tameamea
MGSIIKSKALAEHTRRDLIKVFGELPYTVLWKFDENIEGLPKNIHIRSWMPQTSILAHKNVKLFITHGGLLSTQESLRFGIPIIAIPVFGDQPSNAQKSVQGGHALMIDFSPEMGGPLKDALKEMLSNDRYYKRAKYLSQLFVDRPVNTTHLIQHYVKHAIETNGAHHLRSKALLYSWYELWMLDQVAFLLVILYTIYRVLKKIVACFKRDKSIKTGKEKRH

SEQ ID NO: 8850 - protein, 514 aa, Tribolium castaneum
MRSVFFIVISTFAIGQTANILGIFPMPGKSHFVMFERLLIGLAEKGHNVDIATHFPTKDPPARYNQLSLVGSLPIFVNNLSLNAFDGFTNFHMIHFMTKICGVDVCAATLNTPVLRDLKKTKKKYDLVVTEIFGSDCMLGFGHYFKAPTVSLISSISLPWAGDRIGNPDNPSYIPNYFVSTTAKMSLFERVENTIMLLYTKFLYHYFSSKESNKIAKEFFGPELPSLEELAQNTSLVIVNSHFSISHSRPTVPNFIEVGGLHIHEPKPLSKYFENLVTSDANKGIIYLTMGSMIMTETFDPEKLQGMFDAFSELPYKVLWKAKRENFPQGLKIPKNIHFENWMPQMDILCHPNVKLFVSHGGLMGSQEAVYCGVPRLGIPLFADQDNNIRASERMGLTIKVAYDDISKKTILEASKKLLEDPTYKQNAERVSKQFKDRPLSALDTAIYWVEYVIRHKGAPQLRSAGADLAWYQYYLVDVVVILASGLFVFLLLTTYVLKLVLRFIYGNHKHKIE

SEQ ID NO: 8851 - protein, 517 aa, Daphnia pulex
MNNRAFLIFTVLVASFVQSCSSAKIVVLYTVSTKSHMYAVMPAIEELAQRGHQVSIFSSFQGMAKNVKNGREFFLKEAAQLVDETEVDWFSMQKEGLNQFLTMMRYVKQMSLTSFNNLLTHPDFLEILRKREVDLFIVDGYFHEFLFPIFDHIGVPFVTHSSNSAFPNMLAAMGASKDYAFVSTSIVQLDDPITFPRRLLNVMLNEISRHIRTHYILRDLDALLQSHIPGIRSIAEVEGEASLCIINSHPMTNWPRSLPPTIVPIGALHTRPAKSLPKELKEFADGATDGLIVFSLGSFVPVSSMPKETLDTFIRVFSKLPQRVVWKWEENVPANVSANVMMVDWLPQQDLLGHNNTRVFISHGGMLGTQEAAYHGVPMLGMPFGNDQRGNVYKVKRGGWGLQLDWDKIDDRNLIDALTHLVHDSNVRANASRVSALMRDQLMPGVDVAVYWIEYVIRHGGTKHLQLSSKNLPFYQRHLLDVTLFLGSILGIFLGISYKLTRLLLSWNTKNDKIKMN

SEQ ID NO: 8852 - protein, 467 aa, Drosophila willistoni
MYFPTINGTHHIRVHKLDQLMQELSEPELDFPTNKWTEAKFVSYFYYYSSYHILADPQVQQILHNSSAHFDMIIVDTPHSDALCGFAKHFNAPMVGIAAYGAAWIVDYLAGNSAPSVTEPVSHMGYTYESTSLLNKWRNWIFLTEEWLLARLIYLPPQTKLYRQYFNDSYSNFDEIRRNFSLILVNQHFSLGRARSNVPNLIEIAGMHMCFQKDCKLDAMPEDLQRFMDEAEHGVIYFSMGIEILENWLPKHMIQTLSETFSKLKQRVVWKIDNWETRQNKSDNVFYGSYLPQQQILNHPNVKLFITHGGLLSIIETTYYGVPILSLPFYYDQFWNAQRMRLAGAGETLDLHSMNVEILNRSIHQILQNPSYATNIRRMSTQFRDQPMKPLETAVWWIEYVLRHKGAHYMRLAEHDMAFLQYYNIDLVSIILGRIGLTAIIVILLGYKLTTFFIVHSHMSLNIPLIR

SEQ ID NO: 8853 - protein, 524 aa, Bicyclus anynana
MAKNIIVFGLAIALMMSSSEALRILVFFPMYSKSHSILGHGVVNRLLEAGHEVVHVTSFPTEKPSPNLTEVNLEETGKKMKASMANDDTYKIKNMVGKGNFGDSVFFMYFTYDIHKKILGTEELVQFLKDPKQKFDAVVLEWFFSDVIAGIAPLFQCPLIWFASTEAHWQVMKLIDEVPNPAFNVDIFSASRPPLSYWERFLEFYTMMKKMLIFSVIFTPWEKTLYHETFTSIAAAKGLTLPSYDEAVYNGSFMFINSHPSIGTPFRLPQSAKYIAGYHIDRTVKPLPKDLQKLMDEAKYGVIYFSMGSNWKSADMSENMKKTLLDMFAKLKQTVIWKFEEDLDKVPANVQLVKWAPQLAILAHPNLKFFITHGGQLSTTEAIHFGVPVIGIPIAGDQYVNMRSVAKKGFGIAITLAEDMADHIYVAIQKMLESNKYKAKAKELSFIYHNRNQQPGDELVFWIEHVVATGGASHLKSPALSVPCYQKMHLDILVVLLIVLVVGIKLIRRVVKKDNSKGKKEKTK

SEQ ID NO: 8854 - protein, 526 aa, Nasonia vitripennis
MNFFIWILALSLTVTGGGADGKLKILALMPYNGKSHFYFAQVLFEELAIRGHDVTVLSHFPRKTPLTNYRDISMTSEISKGVHGVSMEDMSARSLYSKMMVFFDRGLYQVCHEGLAHLNVQKLLKSNEHYDLLITEMFNTDCFLGFVYKFGAPHVSIRTSPLSTWAVDRTGNPDNPSYIPGTTAGHPSRMNLLQRLDNLVYNVFYKIVYRIYDVYCEQVAMRYFGKDMPHLDDIARNASLFLVNSHFVHQYSKPLVPTVKEVAGLHVRNPKPLPKDLENWISGAKQGLLYLNLGSMLAASSMAAEKRQAFLEAFRQLEGYRVLMKWDDEESGVESLPGNVKLIKWAPQNDVLHHPNVKLFISHAGMLGTIEALHAGVPMVAIPFFGDQMTNARLLEERGLGIVLEYRDITFETVNRTLHRVLQPKYAKTAKELSDAFRDRPMPPLDEAVYWIEYVARHKDTAAVRLMRTPALDLHLYQYFLLDVLALIFFALLTFFWCLRQLGRTIYKLIARKHDESSKKSKKKKN

SEQ ID NO: 8855 - protein, 522 aa, Drosophila simulans
MPPIFLLLCLLPGYLEGARILAVFPLPSPSHYFFALPYLKSLASLGHEITSVSPYPQREPFRNIHDIPVPEVFENFNEVLRIASTPKSIWQSSDFINEYVLNLTKTVLNNEGVRRDILGPQKPHFDLVIMDLWRIDVLSGLAAYFDAPIIGMASYGTDWKIDELMGNVSPISYLQSPSSRFYDLEAYGQRLSHLVERTISYINYKWRHVRKQETLYRQFFPSIAERKPLSEISRNFALVLVNQHFTLGPPRPYVPNMIEVGGLHVDQNPEALSAELDQFIQGAGESGVIYFSLGTNVKSKSLSEDRRRVLLETFASLPQRILWKFEDEQLPGKPPNVFISKWFPQQAILAHPNVKLFITHGGLLSTIESIHHGKPMLGLPCLFDQFRNMDHVKQVGLGLVLNIKQMTSEDFSSTIIRLLTNKSFEETARITAARYRDQPMKPMETAIWWTEYVLSHKGAAHMQVAGKDLVFVRYHSLDVFGTFLVGALVILGIVTCLLVLTLRKCLLLVKRGKSEVIKKKIT

SEQ ID NO: 8856 - protein, 524 aa, Myzus persicae
MESQLKVLMFVHGACTSVIIIVTVFSPANTANILAVFPHQGFSHNVVYQPYILELANRGHNITIITNYPLEHPNINNISIRGSMPISNNKKNISHIEGKFMNEIQSSISTIWNFHYRGKIYEAMFTVDGVKKLLNSPSKFDLLITEHFNNELFLGFAFKFNLPFILLSSCNMLPWNQHAIGQPYSLANIPSTLTGLGTKMNFYNRAMNTISHIVQLLGYKLFRRTRDEAIIKQKLDIEVSLDQLILNASLIMVNTHFTMLESKPLVPAAVEVGGIHITPIKPLPVDIQKYIDEAENGVIYFCMGSLLLGESFSAEKRQMFLNVFDKIPQRILWKWEGELPGKPSNVMIQKWMPQRDILAHPNVKLFISHGGLLGTTEAVHEGVPILSMPMFGDQVTNIKAIVRRGAAEMMNYGDLNEDEIFVKITSMLTNPIYKQKAKELSEAFRDRPMPALETAVYWTEYVIRYKGAPLLRSATVGTPWYQYYLIDVLFVIFLFVTTIVVLLYCLIFKVLLRLLNRKSKEKQS

SEQ ID NO: 8857 - protein, 462 aa, Toxocara canis
MRLLLALHFALHCIASSAMRILQIVPGFTNSHILFNYRLAETLTNLGHDVYMWTQMEMSMVITNIVKPPNRVTELRVPIFFSDSMKTEGLKASNERVFQTMMFNEGKAYDLWWTGQEFKDMRIEACEQMLNISEEVVGSFRERSFDLAIAHFHDLCPLAMARKVGVQKVSHSNDLILLSSAKLISKMISIGDPDLWALSQQVPVLLINGEAYLDFPRPLPIGITFMGEIDAKASGLSALSGEIKRIADEADAGIIVFSLGTVSNTTNMPTRMLKSFLEAFTSFKRYTILWRLEKDVPEAKPFKHIHIMNWLPQKDLMRHPKMRLLIAHGGYNSLLETAQAGVPAILMPLFADQFINAKRAQRFGFAELLNKLTISSDIVRHTIDMVLHNSSYALNARRIASILADKPSDDRYASLSHRLRLAVSPRDYFMLKAAHKLSFVQYHFLDLLFVLIVVIVIVCRED

SEQ ID NO: 8858 - protein, 530 aa, Stomoxys calcitrans
MNFLGFVFVIIGYVCVALIQNNEASRILGVFPSPSKSHLLIHSAVAKALADAGHDVTVLATTSDDAQAHRNAPYTFVGIEGPMFDNAFAQEMVNRPLPLYRRLNYILEQIFTMANETMNHEKMLQFLHSHKAGDFDVVILGYFMNDFMLGMGAHFQCPIILSFMVQPIFPINRMIGNPAETSYVPNRFTGLKQPMRFWARVKNYLSSLFEQHILAAIVEWKVQRMYRYNFPPDRYPPLEEVYKNVSLVLTNHHFSQGPIRPNVPALLEIGGIQIKEQPDPLPEDLAKIMDSAKHGIIYFSLGTNVQGSNLSKEKAKMIFNVLSSLPQTVLMKWGDKDFPGEAANIIYKSWLPQDDILAHPNVKLFITHGGQGSVVESQYHGVPMVGIPFFGDQHSNMANVEKSGFGIGLKYATLNENELRASVLEVLNNPKYRENVQRFSKLYRDRPMSPRQLVSYWVDYVIRHKGAKHMQSPAVHMSWWELHSLDVIGFLVAVLTGVVWLLVFLVKLLCCRGRKASASKAVKNEKKKKA

SEQ ID NO: 8859 - protein, 1024 aa, Lasius niger
MENYLKPKTIWVRDKPFWSKKIKRAPLNEISSEVEKFSNYDDDRQLPRISKTIISDARKLSSFMRSPDLALLPQVELLSSDKTKFDSTKPTVLISIGIQERKNVNDNSQEDFSRIKNHRKHSHAWLIEQPFYVEEPTWINLYPDMDSSSQDNTDPYILSRGKKIFRIKDTEQAEKTIENYEDFPNKYPSRNKRLSMKSRVRRFVEMKKKSQNNTVNDNEKDQKKEINYYNFLQDTDSNNMTMTKSQDKKSYKIDKISEDRKTKEDTILFHNIFIKKYQKDKIKNVMEKLPYEFKFIKQNRTSVNDEKIINFAEQKQNIQREDISNHIKNDNSKSAKISRDKKFNNQKSSFPININKRNKRSVLLKNKNFSEVRKKYKTQEISTSSEKNVERNETDVYEQMKNKAYIDKLDDLNTYNNDTFILSSKKSRLDNRTESSNEKDIDHNKYIERPWTIQYYAYHKKLQSEEEPRNEKKEPEIDKNDTEATDSQLTSKSDSESSQINNYFNLRKKRSACRTCKLEPQLQDQWLKDIGREIQDSSLERRNKHSDILEDLSLLEPYVISRGKKASHEFENGIYSTSESRNVDDADRIKVTSFPLAKALLRMLLMEMSGCSNCDINANRLSNKRSPRDRRSSLDEIFAAYDPYYVVRGKRINLDNFLTKMQSLRNQKSASFKTDGKQIRLFYTIHKHEKISLYIDSFQVAKGKPPVVGFIPFGPAPYIKDFIGGPHYPTIRPYTYAAIAKPEGLWQKTCNTLYYIADDLVRHYYYMPNSQQIAERYIGHKIRPLHEIEKNMTIVLINTHSAFEPGIPLPPNAIEIGGLHAQPTAGEEAVTYPDSIREFLDGAENGVIVISLGTNVNWKSVGLDKLKAVTQALSKLKQRAIWKLDVELPFQVPNNVMIVKWMPQDAILTHKNVKAIWTHGGLLSTQEAIWKGVPVIGMPFFMDQKPNVEILVHKGAGVRLDFKTLSTESVSDALEKVLYNESYTKNMKRLSNEFRDRPVLPLDLAIWWIEYAVRHPHGSLESPL

SEQ ID NO: 8860 - protein, 387 aa, Unknown
  Description of Unknown: Mycobacterium sp. JLS sequence
MRVAVVAGPDPGHAFPAIALCQKFAAAGDEPTLLTGVEWLDTARTAGVPAEELLGLDPTEADDDTDAGAKIHRRAARMAVLNAPVIDALAPDLVVSDVITACGGLAAELLGLPWVELNPHPLYRPSKGLPPIGSGLAPGRGVRGRARDAVMRALTARSWRQGLRQRAEARAGIGLPAEDPGPLRRLIATLPALEVPRPDWPAEAVVVGPLHFEPTAQVLPIPPGDGPVVLVAPSTASTGERGVAEVALEALTPGEVLPAGARVVVSRLSGPDGLVPPWAVVGLGRQDELLSHADVVICGGGHGMVAKTLLAGVPMVVVPGGGDQWEIANRVVRQGSAQLVRPLSAEALATAVREVLEAPSYRAAARSAAATAGQVTDPVQVCHRALA

SEQ ID NO: 8861 - protein, 431 aa, Burkholderia ambifaria
MKILIAAKSEAGHVNPVASAASILISEGNQVAALTGEQFRRQFEDIGALFHPLPADASPDVAHVIAHDPTLRNLPEDAPQLMRFQIAVERALVDPIPLQHVMLQAVLRHFAADVILTESGFLGILPLLLGARERRPRVVICGTYFLTWERDDGAPYLGGWRPASTQAQRAQYAGLSRDHDRLFEQPLIARADELMKDLGARPLHRGVFESAIELADAYLQPSVPSFEFPRASLPASVRFIGGLPITPNLHPLPAWAADLDGRKKVVHVTQGTVANKDFGMLLAPTLAALGDDPGVLVVAITGGRPLDTIPGTMPPNARVASFLPYEWLLPKVDVFVTNGGNGSVNQALTFGVPLVTAGLSEDKADVNARVAWSGVGIDLATGHPTPDALRNAIRTVLANPGYRIEAARKAREFAAIDTRAEIIRAVTSRST

SEQ ID NO: 8862 - protein, 422 aa, Pseudomonas sp.
MHVALISPPLPSHLSTHLVLGEALVQLGHRVTLLHQADVGDRPRPPGVDFQAIGAASHPRGSLAPLLARTASRQPWAVFGVIADMARNTDLFCREGPGALRDLGVDCLIADQMEPAGGLLGDHLGLPYASLACAVPMNREPDLPLPTLPFAYPTSERERQIVQGATRVFDLMMGRQGRVIQRHAQAFGLGERRTLDDCFSPYLQLSQCLPGFDFPRHMPPAQFHEVGPLRSPSVRQQRFELELDPRRPFVFASFGTLQGSRLALFRRVAQACRQLGAQVLIAHCGRLDGTSERRLLDDGATWVTDFAPQEAVIARADAVITHGGFNTVLDCLAAGKPMLALPMVFDQPGIARRLERVGAGICLAPRLASRARLTQALGAVLADPAYRRAAERFVPIAAAAGGASTAARLVDGLAARGRDRAS

SEQ ID NO: 8863 - protein, 490 aa, Daphnia pulex
MNVKTLLFAVLVASFVQSCISARIVVVYAVCSKSHMIAVMPAIEELAQRGHQVTVISPFKGIAKKGATQFLTMLTYIKEISLKACDSILNLPEFREIVEKRDADLFIVDGMFHEFLFPIFDHIGVPFVTHSSSSAFPSTLVAMGAPIDYASVPLPILDADDRMTFSQRLMNIIPNEIMGVLITHYIKKDLEALVKSHFPGVRSIAELEGEASICIINSHPMTSWPRSLPPTMVPIGALHTRPAQPLPEGLKEFADGATDGLIVFTLGSFVPVSSMPKETLDTFIRVFSKIPQRVVWKWEADAPLNMPSNIMMVNWLPQQDLLGHNNTRVFISHGGMLGTQEAAYHGVPMLGLPFGNDQRGNIAKVKRGGWGVQLGWDKIDDQSLTEAFTYLIHDPNVRANASRVSALMRDQLMPGVDVAVYWIEYVIRHGGTKHLQLSSKNMPFYQRHLIDVCLFVTSVLSIILYLIFIIGRKLFRSCLSRSKNVKTKKN

SEQ ID NO: 8864 - protein, 527 aa, Vanessa tameamea
MASRKMILNVILILMVSSSEALRLLVFFPLYSKSHSILGQGMVSRLLEAGHEVVHITSFPRDKSEANLTEINLQSLGVKMKAEAEKLEQFKLKNLVGKGNFGDSLFFIYFTHEIHKQILDDPALVKLLSDPKEKFDAVILEWFFADEIAGIAPLFKCPLIWFGSTEAHWQVLKLVDEIPNPSFTVDLFSNSTPPLSFWERIRELYKVLKKSLIIGALITPFEKTIYNNVFNKIAAERGVTIPSYDEAVYNGSMLLLNSHPSIGTPFRLPQNAKYIAGYHIDTKVKPLPKEIENIMNEAKHGVIYFSMGSNLKSIDMSDYMQKSLLTMFSTLKQTVIWKFEGDLDNVPTNVHLLKWAPQPSILAHPNLKFFITHGGQLSTTEAVHFGVPVIGIPVAGDQHANMGSVTKKGFGILVNLAENMAINLQIAIKEMLENTSYRTKAKELSHIFHSRQQKPGDELVFWIEYVVNTRGAPHLRSPALSIPFYKKIYLDLLVLSMLLLYLLVLATRRFVCKRCRRASKSKKEKKN

SEQ ID NO: 8865 - protein, 222 aa, Diuraphis noxia
MGSMLRGESFSAEKRQMFLNVFAKIPQRILWKWEGELPGKPPNVMIRKWMPQRDILAHPNVKLFMSHGGLLGTTEAVYEGVPILSIPMFGDQLSNIKTVVSRGAAEMMNYEDLNEDEIYVKITSMLTNPIYRQKAKKLSEAFRDRPMSALETAVFWTEYVIRHKGAPLLRFATVGTPWYQYYLIDVLVVIFLFVTTIFLLLYCSIFKFLLRLLIRKPKEKQS

SEQ ID NO: 8866 - protein, 516 aa, Halyomorpha halys
MKLWMLPLLLVAYTEAARILAFFPIPGKSHHYVFRPIMAALGRRGHEVVYYTGFPYERTVPPGIKQVDLSDELPDLYSSVDITDFMTSSIFEDVKKLFGYSFFYSPFILECPKVQKLIHSDEKFDVVLSESYFIQEYLSAFMHKFNAVGIDIISLGDFGWMNELVGLPDNPSYQVDYKAVLTPNMNFWERVYSTYVNVVTTSAGYHYLNQMENFVDKYFNYTGHESRPPFMQLLSNRSLILVNYNNVVGYPVPKPPHRKDIAGVTITPRKPLPKQVKKFMDDALNGVIYFSLGSNVNVSHPTNRKMVKVFMKVFEEVPQKILMKWETTTFEGKLPKNVHLEKWYPQQDVLAHNNTVLFITHGGYLSLVEAVHFGVPVIGIPYFGDQAKNFRFVEEAGIGKMLKLNEINYDNLSRMVKEVLSNKTYKDEMTRMSKMFRDRLVEPVDEAVFWIEHVIKYPDVLKPKALSMSYIQLHLIDVMLFVISVLLAVVFIAWKSITIIVRLFKRKSTPSKEKTS

SEQ ID NO: 8867 - protein, 530 aa, Stomoxys calcitrans
MNIQGQTFVGWVLNALIGFSILQGLEAKRILSVFPSPSVSHLLIHMAVADTLANDGHDVTVIATIPNRFTKSKVKYLHIEGPMFDHGFANHMINNPSHVYVKFAHTVDQVLDMANATMNNRKMLQFLHDNKAGDFDLVILGYFMNDFMLGLGAHFQCPIVLSFMVQPIFPTNKVIGNPAEASYVSSLFAGFKQPMDFWQRVINYLSIALEYYVLSPVMDSKVRDMYRYNFPPDRYPPLEEVYKNVSLVLTNHHFSQGPIRPNVPALLEIGGIQIKEQPDPLPEDLAKIMDSAKHGIIYFSLGTNVQGSNLSKEKAKMIFNVLSSLPQTVLMKWGDKDFPGEAANIIYKSWLPQDDILAHPNVKLFITHGGQGSVVESQYHGVPMVGIPFFGDQHSNMANVEKSGFGIGLKYATLNENELRASVLEVLNNPKYRENVQRFSKLYRDRPMSPRQLVSYWVDYVIRHKGAKHMQSPAVHMSWWELHSLDVIGFLVAVLTGVVWLLVFLVKLLCCRGRKASASKAVKNEKKKKA

SEQ ID NO: 8868 - protein, 516 aa, Drosophila willistoni
MLVLRFFGFLLLIKYLDGARILAIFPYPGPSQYINVVSYLKALASRGHQVDSVNAFPQKQQVNNFQDIPVLEVFKGYEDLITDLGDPMNIWEENNFENGFFLNITTKVLENKEVQKRLLSKGKAQYDLIILEALRADVLYAFGAHFNAPIIGISTFGTDWDIDKLVGNTSPLSYIPLITAGLSDRMTFSERISNFVKTSVAWLNYNWVHMPKHEELYKKYFPHIADKFQLSELAKNISLVLLNQHFSLSFPRPYVPNMIEVGGLHIAHKPAALPKEMEDFIQGAGKAGVIYFSLGSNVKSKDLPEEKRRMLLETFASLPQRVLWKFELDHLPEKPANVFISKWFPQPDILAHPQVKLFITHGGLLSTIESIHHGKPVLGLPFFYDQFLNIARAKRAGFGLGLSHADMTGSEFKTTIERLLNEPSFMATAQAMSARYRDQPMSPQDTAIWWTEYILRHKGASHMRVAAQDLNFFAYHSLDVLATLIGGAFVAIGLVLFALTKVLRFTQGTKTKQKTM

SEQ ID NO: 8869 - protein, 380 aa, Tsukamurella pulmonis
MRVAIIAGSEAGHALPGLALALRLLAAGHEPVVFTGRQWQGVGARYGIDTRELPGLAARPGDDDGDAGAKIHGRAAYIATRVMPGIEEVRAELVVADILTPGGGMAAELLGLPWVELSPHPLYLPSAGLPPIGSGLAPAQTPRELLRDAVLRAFTARDIRNGRRQREAARAGIGLPARDGGPAGRLVATIPTLEVPRPDWPARTHLVGPLTLEPTDELCPVPDGAGPLVMVAPSTAATGEQNLAAIAVDGLRGEGLRLAVSGLTPPVFDEPWVASGFGRQDDLVARADAVVCGGGHGMLTKALTAGKPVVVVPGGGDQWELANRVARQGSGVLVRPATADAIRAAVRRVVAEPSFARAARAAAATAHRVADPVLVCEAYR

SEQ ID NO: 8870 - protein, 517 aa, Rhopalosiphum maidis
  MOD_RES (268)..(268): Any amino acid
MVNTIVTYYLLVAATVTAYYHASAARILGVFPHYGYSHHMVFLPYLRTLADRGHDVHVISNFDSSHPNITDISVEGSMPMFNNNVTLPDNAGHFGIVSALTNMFILYGLAKTTEAVFDAPAVRSLLDHHTASFDLVIAEHFNSELPLGFAAKYRVPFILLSSCPLTPWTMSLVGQPQQIAYKPSVSSGLPERMDLGQRLTNTAVAVVSAAMFRLMNRPWSQRTLRKRLGLDVSLDELASNVSLVLVNTHWSLNGVSPAMAAVKEIGGXHVIPPKQLPVDIQKYIDEAENGVIYFCMGSLLRGETFSAEKRQMFLNVFNKIPQRVLWKWEGDLPGKPSNVMIRKWMPQRDILAHPNVKLFISHGGLLGTTEAVYEGVPILSMPIFGDQMTNIKAVVSKGAAEMMNYGDLNEDEIFIKITSMLTNPKYRLKAKQLSEAFRDRPMSPLETAVYWTEYVIRHKGAPQLRSAAVGMPWYQYYLIDVLVVIFLTVTTSFVLLYCLIFKVLLKLLNRKFKQKKS

SEQ ID NO: 8871 - protein, 444 aa, Spirosoma linguale
MKTALFIMFPVPSHYNICFGFADSLRKQGYRVVFAGTPNLQTHIESQTFEFVKLPYMQEIVVANWRVALGLFIVSKFEKKDKRVRYREFLTSIDAVQYVCKTILPNEIYIDEHLNVYYLLLKATYPNCTLVNTKLPTHRVLGIPPLTCSHPFQDTARHRLYAWWLWQLFMLKYYYGSWRKKIALLGVDEQLFLRRVTAKMGIQLNAYINPYNLLHDGLVDVPIIHLVPRELEYSWYKMGANEQFFYQPYQRKPDRDDSLFWEQIKPLLDKRERGEIQLVYASLGTLSEGNTKPATLFLNRLIAAFNDLPTTHLIVADKRLFANKPENSPANVHIVDWAPQTELLPYCDLMITHGGTNSILECVQAGVRLVAYPLNLTADHPGNTARMVSNGWGEQGNLRGATQSTIRQKISQMLSDSSSIEKRKQILMPPINDWQPKMDLAKSR

SEQ ID NO: 8872 - protein, 519 aa, Aedes albopictus
MKHKFWSLLCAVVTLVVIPAAVAENILFLQTLASRSHHIWNKQIFERLFDNGHNLTILSFEEEQSVPGKTFLVVKDFMAKVMKDYEGEWDYTAEQSAFTNIHFMYDFYNKASRLLTKEQAVLQLLEYPRTFKFDLIIHDLTMGQFLLGFVEHFGNPPLVSLSAFNIPPHVTTMADAPLFTTYMPHYASSFDNRMFFMERVRNTLYWTFDLFYRNRVYMANEDKRVKLLFGTNATSVKQIEKRSDIVLVNSDFSMDYYQVLPPNVIPVGGLHVGRKEKVPPIVKQFIARANKGIVLLSFGTNVASEMLGEGTNLDMFKVFRSMPDYGFIWKHGDPEALGIMPANVLVLKWVPQAAILASPRTKLLISHGGLLSLQEATWHGVPVVAIPFFVDQYSNAEKLVTAGTGVKLLPKDVNEVTFKGAIQEVLENPSYYENIKQRSYLFKAQPEHPLDRAIFWIEKVLENKGLHYLRSPALDMNIFQIYAIDMVAVVLAIAFLYYLIIRSHLRRPAAGGYVKPKKE

SEQ ID NO: 8873 - protein, 493 aa, Drosophila obscura
MLGICSTVEVQSHHILGLFVNVHRSQLLVHMAVARALLQRGHQLTLVTTLPLAEVELQGNVTHILVPWEQPADEGNLGTSSDWLLRLQRMFNRLEQSGDLLDQPAWKDFQNLSPKPHFDLLLLGYHFNDHLLGVAAHFNCPAVIVSTQQPIGFVNSLMGNPEERWYVSQPYDSRQRNGISAWLFGVWEKLMEMVARRVLQKIYSSHFPEPHYPPFETMRRSVVLALNNHHMISEGPIAPLLPSMIDIGGILLEQKLNETLPEVSRNRSLIIFSLGTRFTWKRSPGHLVKTFTKAFAQFPDYDIYWTYDGLNASEIMSHHSHLKLAKWWPQRHLLGQQQTCLFITHGGKGSLTEALYNGVPMLGLPLLGDQRTNLQKMEAKGWGSTLSMQNVSHVEMSKAMGRILSHSRYSVNISTASHLYRDRPRNASDLATYWLEYVIRHRGAKHLYSPARKLNFIQYYSIDVYALIYGGLLLLIGIFSRINQKISVTRSIV

SEQ ID NO: 8874 - protein, 440 aa, Papilio machaon
MLSNKNVQHVWKTTKFDIVVTEQFNSDCSLGLAHHLKLPVIGLASHALMPWHYSRFGVSFNPSYVSHMFLSGGTKPKLYERIERVLFDSYLRLIYKFYCQRIDQNTLAQYFDDIPPLEELGRNIKFQLVYSYFVHFGSSLYPQNVIEVGGYHVQKPKKLPDDIRKFIEESQHGVIYISFGSMLRSATTPREKIETIISALRELPQRFIWKWEEDSLPGNPSNIYLSKWLPQNDILNVILETDKLECVVVSKWKGEEMCQKSAKWKSVISAHFSGRHPNVLAFYSHCGLLGTSEALYHGVPMLAMPIFGDQPGNAAAVEESGLGVKIEFMELTKKELLEKFKQILNPEFRAKVKILSQAWKDRPISGIDAAIHWTEFAARYPNFTYRSAAADVPLYQYLGLDILLILFGIPLLIIVLFLRYIFNKKKTNSTSKNKHKSKKE

SEQ ID NO: 8875 - protein, 1100 aa, Neodiprion lecontei
  MOD_RES (216)..(216): Any amino acid
MQVKMKLTHLLLVSLSCIICFGRHAKGARILGMFPLQGKSHFAMFKEVLKSLANAGHQVDVVSHFPLENAPPNYTDIISLRGTGIVVHNSMTYELLQSISSAPMEVVIKLAGNDVCESLGKPEMQNLIKNPPTDPPYDLVITELFFASCYFAFGRHLKVPVIGLSSATIMPQANAPLGNPLNTAIVSEISDRPASHMNFRQRLTNTLTTVYMNLQXRYYMKAQNDMVKKYFGPDMPDVEELERDMSLLLVNTHPIFHGIRPLTPAVVEVPGLHIHDEHSTMPVHLMKWLDDSSDGFIYFSFGSMIQFESFPSADVVEMYAAFAKVAPLRVLLKVADPDKLPPGCPDNVLHLPWVPQVQVLKHENIRGFITHGGLMGLQEAVAYAVPLIGIPLFGDQMSNINICVERGIAVRLNYMDLKADEIVAAIKTVSQDPKYKKNMDAASKQFLDRPKSPHDTAVFWIEYILKHGADSLRSPAIKLTWWQVALLDVYGSVLAALLLVLYAFKIIFSCIVRRAFGTGKMSPLAKKTNYQIEWESSMVYYFYSKKTHVAGCLVADYRVLMTRTILRRQIELQRFKMWSRYCTLVLFLHVITAVPGSNGARILGMFPLNGKSHFAMFEAVMKGLADRGHRVDVLSTFPQKKPYPNYTDLSIAEWVPGIVNNMTYDFVLKIAGSSEETFIDHTGNHVCDYLKLPHLQKLINNPPDDPPYDLIIVELFYANCYLAFGRHLNVPVVGLTSSPLLPYINEPLGNPLNTAYVPEIDDGSVSHMNIWQRLKNTLVTWMKIYQSRYFTQGQDETVRKYFHPDMPGIRQLERELALLLVNSHYSVNGIRPMTPAIVEVGGLHVKNDSTELSKELKKWLDESEKGFIYVSFGSMVTIESFPEKTLLEIYTAFKKIAPIRVLLKVANAKSLPPGLPSNVLTSNWVPQVQVLRHMNIKAFVTHGGLMGVQEAVTYGVPLIGVPLFRDQPVNIKNCADKGAAILLDHRDLTADKIVASVNAVTHDPSYKKNMKVLSDRFLDRPMRAGETAVYWIEYILKHGGDALRSPAVKLTWWQLALLDVYGSVLAALFVLSYTAKLILSAIYRRLLYRNRTRSATKKRN

SEQ ID NO: 8876 - protein, 486 aa, Athalia rosae
MVVMKGLADRGHRVDVLSPFPLNKPHPNYTDLSIADDVPRMTNNMNYELVKAISGSSAGLFIHMTGTEICRLLELPLLQDLINNPPEDPPYDLVVTELFYSNCYFAFGRHLGVPVVAITPSPMIPYANEPLGNPLNTAYVSDIEDDSIKNLTFWGRLKNTIITWYRIFQSRYHIEVQNDYVKKYFGEDMPEVRQLERELSLLLVNSHHSLNGVRPFTPAVVEVGGLHVKKKKKSDLLPSNVKKWLDENDEGFVYCSFGSMVKIESFPNETVLQIYSAFSKLSPIRVLMKVAVPESLPPGLPKNVMTMSWLPQEEILMHKNIRAFITHGGLMGVQEAVTYGVPLIGVPLFRDQPINIKNCADKGTAVFLDYLNLTEENILGAVNKVLKNSSFKTNMMDLSARFLDRETPALDTAVFWIEYILRHGGDTLRSPAVKLTWWQLALVDVLAVIVASIVLALYLIKIIVSMILSRLAPTKKPVLTTSKKSN

SEQ ID NO: 8877 - protein, 1466 aa, Ctenocephalides felis
MLRLLFCALLFGALNVEGAKILMMFNAISRSHYILGEALGLGLAEKGHEVTMISPFKKNNNHANFKEIILEDAFDSLLAKEMQNSLVDNKNRNMWKMVFRMAYIGADGTNKTFHNTEVQKLLKSGQKFDVFLTEWFMNEALLLMAQHFNAIPMVMSTAGSSGWTNKMVGNPFNPAYDINLILPFTNPLSFSERLISTAFMVLEEILYCRHMSHQSALYEEHFRSLNGRDRMNEPDLPSIVTNISLLLLNSNLAVSNARAYVPNVVSVGGLHVNPGKLPDDLQKILDDSPQGVIYFSMGSNLKSSNLPVETRNGILRTFAKLNHTVLWKWEDDKLPNQPKNVIIRKWMPQQSILAHPNVKLFITHGGLLSSIEALYFGIPLVGIPVFGDQPMNMARAVKSGYGIKVDLDTISEEILDEAISNALENPKYRERAQFLSNIFRDQDQSPMDKAVSSIEYVLRHKGAPFLRSPAVHMSVYQKILLDVIAGLLAIILLPIFILYWVFKKIVKKCCRSSKVNNAKKRNAQVYGAKILIVFNVVSRSHSNIGHALGIGLAKSGHEVTMFSPYKWEESHPKYTVHILTEVFESKPAQEFRNNTFGLNNKSVVQMLKMMTKLGQESALGTFYHPEMQKLIKSRAKFDMFISETFMNECLYSLANYFNAHSASVSTFGTSFWTDKMTGNPFNPSYTSNTFLTFGSPKTYLQRLGNTVQTVLDYYLYWKHLSDQQPLYDNFTSTLYNGDMSKVPSFTSVITNVSLVLLNSNFVVSDAQAFVPNMINIGGIHINPKKLPEDLQNRLDNANEGVVYFSLGSNLRSAQLPNATRDAILKTFSKLNKTVLWKWEDENMPNKPDNVVILPWMPQQAILAHPNVEVFITHGGLLSSLESLYFGKPLVGIPVFGDQPKNMVRAEWSGYAVKIELHEITEERLTHALSEVLTNPKYRLRAQELSRIFRDERQTPVEKAVSSIEYIIRHKGAPFLRSPAAREALGIALADNGHKVTMASPFKRAENHTNFKEIVLEGLIEKSINAMYNFESNDRSALSMIKYIFDVRNKFAELTMQHPEMKKLANSSKKFDLFITEFNLNECIFGFGYHFRTINIVFSTIGTNYWTDEMVGFIKSPAREPNIILGYTVPMTYFQRFVNSLFYIGYDYLDRSRMNYQEQLYKNFFQPLQIGSPTQFPSLSDLYRNFSLILLNNNVAVSKPTPQYPNMINVAGMHIKLQNLNEDLQILMDQAREGVVLFSMGGNLKSSNLPKEYLNIMLTCLGKINQKVLWKWEDEHLPNKPDNVIIRKWLPQQDILAHNNTVAFITHGGMLSKIEAIYFGVPLLGIPILGDQFMNVAEAVQDGIAVSLDLNKLTENSFDTALNDILYNSSYRERVQKLSKIFRDTPETPLQKAVNSIEYVLRHDGAPFLKAPFDDMPMYQILLIDVIGGIIVIIVAIIWIVYILVRFLITKKNSQKNSKVKKSKKIS

SEQ ID NO: 8878 - protein, 411 aa, Necator americanus
MYRLIYIFLLISTARSLNIVIYLSLVGKSHVDFTSALINSLVDRGHEVDLLIARQNTLVTSNGTHKASKVSTFSFPGQSPWIDVEHLKTPFDLQRRKPQMFLEYVRIASQLCRYGLASGEPASFLRRKKYDIGITSDYDFCGYILFHQAGINTVASFTATNLLSHQAFSLGLPSPASCVTGNFDLSSGSHRPGIFERATRLLKAMRFVFVERPEYEELGDALIREFFGKGFPTIGELLHNSDLVFVNTDEIIEKPRPLSHKVKYIGGIALSEPKPLTKDMRNLLGNYTKNVVFSFGTQVPTENIPLHIRKMFVEAFAHFPNVNFLWAYKSQGDEGNMFATVPNVKLVEWLPQTDLLNDPQVVGFISHMGLNSFLEASRAGVPIIAIPLFADQTHNAHIGMPHLDSVRYSLF

SEQ ID NO: 8879 - protein, 777 aa, Copidosoma floridanum
MCEEVMKGLAARGHQVDVYSHFPLSKPVSNYTDFSLKGTVQELVNNFTYDDVVSSKASTSFIVNVAMDWMKSMCRLLDHPYFQKLIKNSPRDPPYDLVILEFVIPSCFIPFGRHLNVPIIGIVTTSTFDLIYYPQGNPFNLAIDSSLFSPYSTPMSFRERLENYIAHHVSIIIYRFSGEKLQNECIKKVFGPDYPGSPEILKDFSFILVNQNKAINGIRPLTPTIVPVGGLHIVDSNETLSQDVQKWLDESEHGCVYFSFGSMVLLETFPLPLIQELYRAFKNIAPTRILLKVVNSKLLPDGIPSNVMIKPWLQQIKVLKHKNVKLFVTHGGLMSTQEAIYYEVPMIGIPLFADQYMNIDGYVKLNIAVGINKHEISEQSLTEAFKEVLGNPIYKESMKNVSRKFRDNLVNPIDTAVYWVEYIHRHGKDALRSPLVDMPWWQIYLLDVYGVIVAAIAVVIYLLIKLCLLLRVMWRKVYRQMSLKLFSVPICFVPFGRYLNVPIIGIITLPTYDFVHDPLANPLNLATDPSLFSQYSSPMIFTERLHNFITYYVVKIVYKFSGDKLHSECIRKVFGADYPGSPEILKDFSLILMNQNKAINGIRPLTPAIVPVGGLHIVDSNETLSQDVQKWLDESEHGCVYFSFGSIVKLETFPEPIIQELYKAFENISPIRILLKVVDHLDQESMKNVSRKFRDNLVNPIDTAVYWVEYIHRHGKDALRSPLVDMPWWQIYLLDVYGVIVAAIAVVIYLLIKLWLLLRVIWRNLYHQMSLKQVKKE

SEQ ID NO: 8880 - protein, 382 aa, Oesophagostomum dentatum
MDPHVDMVGHHSALVQIPYISKYYDPNDYLDLDIKGSALWATPRMEGRCFSMEDLEKFMRVNEKLCRGIFEDTRFVRALRDCSFDVALHEAYELCAVAVLEMIDVKNTIVVSALGVTPYIQEIAGFAANPSFIPGMFTTYSDEMTFWERMDNFKFEIEMYYWRASWEKHIWKLANKARPRFPELRRLLKEKTGVVLINVNEITESPRPTANILRYIGGATIREPRKLNERLNAILNERRENVYFSLGSLAQSKDMPMHLKQEVIDAFASFPNTTFIWKYEGEGDAILFEKYPNIYPIKWLPQVDLLADDRLSLFITHAGMNSVLEATFYGKPMIAIPLFVDQILNAKNMRSRGLAVMIDMHDLSRDTLVSAIHETIRANRYA

SEQ ID NO: 8881 - protein, 533 aa, Copidosoma floridanum
MAFTTNFYVYAAFATFLFPSTTPNLAHGLRILGLFPYHSKSHFIMCEQVMKGLAAKGHQVDVYSHFPLTKPVSNYTDFSLKGTLQTGVNNVNYNNVVSNETPLRYLVNKLMNDIKLMCQLLDHPYFQKLIKNPPRNPPYDLIILEFVIPVCFIPFGRHLNVPIIGIVTTSTFDLIYYPQGNPFNLAIDSSLFSPYSTPMSFRERLENYIAHHVSIIIYRFSGEKLQNECIKKVFGPDYPGSPEILKDFSFILVNQNKAINGIRPLTPTIVPVGGLHIVDSNETLSQDVQKWLDESEHGCVYFSFGSMVLLETFPLPLIQELYRAFKNIAPTRILLKVVNSKLLPDGIPSNVMIKPWLQQIKVLKHKNVKLFVTHGGLMSTQEAIYYEVPMIGIPLFVDQNMNIDAYVKLNIVIRINKHGISEQSLTKAFKEILGNPLYKESMKNVSRKFRDNLVNPIDTAVYWVEYIHRHGKDALRSPLVDMPWWQIYLLDVYGVIVAAIAVVIYLLIKLCLLLRVMWRKVYRQMSLKLVKKD

SEQ ID NO: 8882 - protein, 523 aa, Ceratotherium simum
MARSWTLLLICFLLPGILLSEAAKILTLSLLGGSHHLLMVRASQILQDHGHNVTVLLQRANLLISGFKEEEKSYQVIPWLLPEDHYKEFMKFFDFFMKEALAGRDKFENFLKAMELMGLQCSHLLKRNDIIASLKDENFDLIFVDMFDLCSLLIPEKLGKPFVSIISTSFGFMDFGLPSPLSYVPVFDSLLTDHMDFWGRVRNFLMFFDFSIRQWRIHSTFDNTIKEHFPEGSRPVLSHLLKKAELSFVNSDFAFDFARPLLPNTVYVGGLMAKPVKAVPQEFENFISKFGDSGFVLVALGSTVNIFQSQELLKEMNSAFAHLPQGVIWKCKPSHWPKDIKLAANVKIVDWLPQSDLLAHPRIRLFVTHGGINSIMEAIQHGVPMVGIPIFADQPDNLLRVEAKKFGVSIQLKQIKAETLALNMKQVIEDKRYKSAAVAASIIRRSHPLTPAQRLVGWTNHILQTGGAGHLKPHAFQQPWHEQYLLDVLSFLLVVTVGTVWLCGKLLGIVARWLFGAKKLKKA

SEQ ID NO: 8883 - protein, 527 aa, Caenorhabditis brenneri
MRVPLLLLLLFATSSLCYKILVSVPKFGYSHMKTMGKLADILVESGHDVTFLMPVDVPIPQNGTELATVVLVPPTDAISEIMGAAMKSGAVANLWTHSANSKQGIMWSTDMIGQVSYHNTKNMIENKALIQQMKDEKFDIGITELFDFSGLAFFEVIGLKNVIGAHTTSVFEGTLMATGAPILPSFVPGSQTFTDDSGSILSRLNNLYMTYWSYEFQNKIQGFAQKALDEHYGKGKAPKIWNLVKEITWFFVNSDPIFDFPKPLPQNIIEIAGISVSKTKPLGKEWDEILSKRSKNVLVSFGSIASPTTMPEAVKKSVVDSFAAFPDVTFIWKYDDTESGLTSHLKNVHIVKWMPQNDLLADKRITMFWTHGGMGSLMESAQKGVPLIVVPIFGDQMRNAQIARRHGVTVIYDKMELSNTKKLISTLKEVLENPEYKKSADLLAQILATERVSPRQKIVDTVELAGRFGQMPRWTSAGRDFSMLKYFNLDLVLIFIFMVISLIFAILVVIRRILVKLGFSGNKEKSE

SEQ ID NO: 8884 - protein, 527 aa, Caenorhabditis remanei
MKLIAVLFVVLLILPSTSAFNYLVVSPQFGHSHSTFMGKVADSLSDAGHNVTILNILIASKFRGRPYTKSTKDIVYMETTEELDQISSLMESGDFSRYWTEEGSMLETIPSYQGFMKIFEKVYINVKQQTDVLDELKESRPKYDVILFESFMFMAKAIQEYLEIPVFIPVTSVTHDGRLAELCGEPASPSYLSGYFTNYGNIMNFQERLTNTISYFLGKIILEYPKWKTLHDPTKRLELDSVYHHAPYVFVNSNPYIDFPRPMLAKTIQVGGLTVDVKKLRSEKLDEKWNTTLEARPHSILVSFGSMFKSIYMPESYKLNFVKVMKSFKNVTFIWKYESEETGFSQGAENIVFNKWIPQTALLADSRLSAFLTHGGLGSVNELSYLGKPAILCPLFADQLRNAKMLARHNGAIEISKFDLADYKTLQSAIHRILFDKSITENALNLAKRLENQPMKPKELLVRHAEFAAEFGEQPGLDCNIRNMTFIEFYLLDVFGFLASIVLLVLLVIYFAAKKITGMLVKKLKRD

SEQ ID NO: 8885 - protein, 489 aa, Propithecus coquereli
MAGQRVLLLVGFLLPGILLSEAAKILTVSTMDFKEEEKSYQVMSWLLPEDHQKELNKHFNFFIEEAFNGRGIYENFLKFMEQLAFQCSHLLSRSDIMDSLKNENFNLVIVDSFDYCHFLIAEKLGKPFVSVLTTSFANVNFGLPSPLSYVPVYNSLLTDHMDFWGRVKNFLTFFIFSRKQWQVQSLYDNTIREHFPEGSRPVLSHLLLKAELWFVNSDFAFDFARPLLPNTVYVGGLMAKPTKPVPQELENFVTRFGDSGFVLVTMGSMVNITSFREVLKEMNSAFAHLRQGVIWKCKHSHWPKDVNVAANVKLMDWLPQSDLLAHPSIRLFVTHGGQNSIMEAIQHGVPMVGIPIYGDQPENMVRVEAKKFGVSIKLEELKAETLALKMEQVIEDKRYKSAAVAASVIRRSHPLTPAQRLVGWIDHILQTGGAAHLKPYAFQQSWHEQYLLDVFMFLLGLTLGTVWLCGKLLHVVSRWLCGARKLKET

SEQ ID NO: 8886 - protein, 529 aa, Neodiprion lecontei
MRPLSCILLFAVTSVVLLSDAYRILGIFPFNGMSHFVMFERLMKGLAEHGHQVDVVSHFPLKKPFPNYTDVVSLAGTKPNLVNNMKVQISKSDEKLPSAAVFFASVFGIELCKLMEHPEFQKLIKNPPTNPPYDLLITEIFGANCYLAIGQHLKVPVVGVVAAAMLPWANEIVANPDNTAYIPNSFSDFDEKMNFWQRTQNTLSNIWSKWQFNRISEGQNEVIKKYIGPHAPTVREAEKNVSLILTNSHYSLNGVRPFTTAVVEVGGVHIDEKEATFTNDLLQKFLDDSSDGFVYVSFGSMVKIESLPKEILANMYASFAKLAPVRVLMKIANPEELPPGLSSNVLTLSWIPQLAVLQHKNTRAFVTHGGLMGTQEAIYYGVPMIGIPLYGDQIQNIRVYAKMGIAVHINNEEITEENLDAAFRAVLNDPSYVNAVKRMSERFRDRPMSPLDTAIFWVEHVVRHGGRNLRSPAMDLTWWQIELIDVYSFLLSSIILALYVIVAMVKKVKSLFYPGDAKCEVTSHDKKVK

SEQ ID NO: 8887 - protein, 519 aa, Haemonchus contortus
MILLYLLTVYITLCHSYKVLVINPKMGYSHMNFMGRLADTIAEAGHEVVTLQPVMDGSLASNGTTKSRLIQRGPFDDLARPTNSEDMKLVWTSGAKNPIGLVMFVPMISNFAVKTLSHLLDDKPLLEQLKAEQFDVAITELFDFIGIGVLNAVGVKNIIGAHSSVIIEGTALAIGVPVIPSFMPASFSVTDDSTDLWTRATNLVFTGASLYFQKGIASAIDRLLKEKLGSNAIPVWDTVSNMSWIVDNAESLLDYERPTLSKVVHVGGLSVHKPKPLNKEWDDVLNRRPHTVLISFGSVARSALMPDLMKKTILDVIKSYPKITFIWKYEEPDDKIFKGIENVIPTKWMPQGDLLADNRLTLFVTHGGINSMMETATLGKPVITIPLFADQSKNAKLMQKYGFGIIVEKTELLGGDGLREAIGRVIKDKTYQISATRISRLLSRRPFSPEDKLVKTVELAAEFGNIPELKAAGRNLSFIVYYNIDLLVILSVVFLSVFGLILYITLRFSVLLRLSYKGV

SEQ ID NO: 8888 - protein, 501 aa, Neodiprion lecontei
MLRSFVSATLILLAAFWHYGYASRILGVFPTPSISHQIVFRALTLALRERGHQLVVVTPDPVNDPMLTNYTEIDLHFLYADTDGGENWIETLAKERWTDIQDAYLSTVLTQTELILDHPELKKLYAPNNGQKFNLMMIEMLYYPALLPLATRFDVPVVGITSLGLSLSIHYAIGNPIIPSHSSNWDTEEMIFGEAIFWQRLKNFIWVWKFLYKYRTRYMPAQQALARKYFGNDIPDISDIEKNVSVVFVNQQTPISYLRPNIPKVIDIGGFHIAREIKPLPKDLQKILDDSTQGFIYMSLGSNIKSVMLSNEVRREFIAAFSELPYTVIWKFEDDFLANKPENVIIMKWTPQQSILAHPNLKVFIYQGGLQSTEEAVSHGIPVIGLPVFTDQHVHANKMLQEADDGLAEFAQGQTLRFTEERDLVDRACDTSQRSSTSAVHYGRRAVVSASRYGHCFCYFHRISHNFKFGNNCVLQDGQSYSCNDSPNQSEGQNKLTRPRD

SEQ ID NO: 8889 - protein, 507 aa, Trichogramma pretiosum
MNYITVFLILNCATGLMMCDAYRILGVFPFAAKSHNILFESLMKGLAKRGHQVDVVTHFPLSKPPENYRDIINLNGTMENLVNNFTIEFVNQMAGDIVESIATNYGNRICEFMGLPEMQQLIHGPLPNPPYDVVITEVFGANCYIGLGRFFKVPVVALSSATEYPWIADFTGNDDNLAYVPNAFHVGVEEMSWWERVVNVYGHFKALIQFHHLTDYSQTQSMRKYIDANMPDIREVVRDVSLVLVNSHPILFGVKPLVPSLVQIAGLHVEENDEILPRELEKWMNESTSGVVYFTLGSMVLIETLPTDTLKEIYKSFEKLAPMRVLVKIVNETKLPSGLPKNVKVLPWTPQQPLLAHKNMRVFITHGGLGGLIEALYYGVPMIGIPLFSDQFRNVEAFTAKNMMIQIKLSEINEKNLDNALNRLINDSTFKNNAIYYSNVFRDQPVSPMNNAIFWIEYVIRNGNVLRSPALDFYWWQLALLDIYGPGLIIVLMSLYLVFVGHFYTVL

SEQ ID NO: 8890 - protein, 533 aa, Nilaparvata lugens
MSTLKLSNFFIFFLIVLQSGIEIEGYNILCIFPSISYSHQKPMLAVSEALARKGHNVTAITLNPNKKLNLKNYRQVDANSLYAVWARLQSSVGFSLQQRMTAFEVVKGFVDSSEIMNRAMLYHPAIDGFARELESSNTTYDVVIYEALIYTSLLGMVLQNGKPLPPTIGLLTLSVFSDADWYMGNPFAESYIPTLNVPFNDQMTFYQRLYSLMVILYTWLQVTYKCRPIQEALMKERFGQNLPSIEEIERNRSMLFYLNDFTTGYLRPVQQNTIFVGPINVENQPVEPLPQDLQEWMDGAEEGVIYFSLGSNMKGTSFPAEKRAAFIDAFSRLDKFRVLWKWEDDRLPGQPSNTMIRKWLPQNSILAHPKTKLFISQMGHQSSQEAINFAIPMLGIPIYGDQLQNALKFEKDGISIHMDIEDVDFNANVYKNIQRLLTDNTYKQNMLRLQRLSQDKPMSAADTAVWWVEYVARHKGAPHLRPTVLDLPWYQVYLIDIILFLLAVFAVIILSLYMLLRMLCRCRTKADKKVKVN

SEQ ID NO: 8891 - protein, 412 aa, Haemonchus contortus
MLILLVLCTVVTIISSLNVLVWNPIISHSHVRFLGNIADVLHDSGHNVTIFSPVMDPHANLVGHTKPIFQIPYYSKYLNNSGFDDYDMGSPAFWTSPMVEGRSISIEDIKRYHENALLMCKALIEDHELLDRLRNSRFDVALHELYELSAVAFLELIGVKKAIVVSAAGMTLHMKEITGMPPNPSFVPGIFTTYNDEMTFWERLDNFKCEIELNYRFLQWEEKLRQLFNKASPGFPDLRKLLKQKIGVILVNANEFTETPRPRGNIVRYIGGMAIPEPKPLNQELSAVLDKRSTNVLFSMGSLAKSSTMPLHLKKDILNAFAAFPNTTFVFKYDGKDDLELFKPYPNVHVMKWVPQVDLLGDKRLSLFVTHAGLNSITEATYFGKPMITIPLYADRVHQRQESETNWIGSTD

SEQ ID NO: 8892 - protein, 484 aa, Cydia pomonella
MGRYTPNGAQPNSLNMFRNNLVLLLPSLVHFVHTANILCVFPTPAFSHQSVFSAYTDRLAKAGHNVTVITPLPRRVPHLHEIDCSKSLTVFNELVKKSSLFKVRGVVADESTVTADNYTPLVDMVVAQFQNKNVTDLIENKANMFDLVVCEAYLSLNLIFGHLFDAPVIRISSGHGTTENFDTMGAVHNPLVYPSSWRSTFSTNKTQIMEIEHRLAHEWKKLERVQETRLKQVFGGGSGTSLHSLKKRVVLLLVNVHPVMDNNRPVSSNVQYLGGLHLKRAQSIKDEELRAFIKNDFVVYVSFGSMLDATTMDHRALQEFVRVMNALPYKVLWRVGSSVHQRFSVNGSNILTREWFPQRALLNSGVVKLFVTQGGLQSIDEAVDGGVPMLCIPMVGDQFLNCERVWRLGVGEKLDVVQLEQAKMDRMIVSMVANERYNERVDDLKKLVSDTPVNALRKVLWYTDKVLRNGSLMYVFNGNKYWSK

SEQ ID NO: 8893 - protein, 523 aa, Ailuropoda melanoleuca
MAGQRALLLAGFLLPGFLLSEAAKILTLSLVGGSHHLLLDRVSQILQDHGHNVTMLHQRGNSFISDFTEKEKSYQVISWLPPEDYNKGLKENFDFFIKEALGDRYTFGKFLSFMEQLGLQCSHFLRRKDIMDTLKNENFDLVIVENFDYCPFLVAEKLGKPFVSILSSSFGAIDFGLPNPLSYVPVFHSLLSDHMDFWGRVKNFLMFFDFSIRQRQIQSAYDNTIKEHFPEGSRPVLSHLLKKAELWFVNSDFALEFARPLLPNTVYVGGLMARPVKPVPQEFENFITKFGDSGFVLVALGSMVSNFQAQELLREMNSAFAHLSQGVIWRYKPSHWPEDIRLSANVKIVDWLPQSDLLAHPCIRLFVTHGGMNSIMEAIQHGVPMVGIPLFGDQPENLNHVEAKKFGVSIQLKQINAETLALKMKEVIEDKRYKSAAVAASIIRRSHPLTPAQRLVGWIDHILQTGGAAHLKPRALQQPWHEQYLLDVVLFLLVVTLGTLWLCGKLLGMVARWVCGTRKLKKA

SEQ ID NO: 8894 - protein, 537 aa, Neodiprion lecontei
MMLLFCKSAGMKERLCFTIFLLILSISSEVRGYRILSVLPYNAKSHAIMFEELNKGLANRGHQVDVVGHFPLKKPVENYNDIINLADDSVPKLQNNLTYKFVTSSVLDKPVVPFLTSMFGSELCKLMDHPELKNLIKNPPNDPPYDLLIGEVLAAHCFLALGQHLKVPVVAIVTSPMWPWSSDFVANPDNSAYVPGVFSSLIAPMSFWDRMTNTLDLIGKKMQFYYYTSDQDEFIRKHLGPHALGVREAERNVSLILVNSHYSLNGVRPFTAAVVEVGGIHIPKEIEPLPRDLQEWLDRSKDGFVYVSFGSMLKIESFSGETLRALYKSLGKLAPVRVLMKVAKPDELPVGLPSNVMIRPWIPQLAVLCHKNARVFFTHGGLMSTQEAIHCGVPMIGVPLFSDQPLNVARYIRKNVAVSLVHDELTEEKIDAAFEKVLGDPSYMAAAKKISAEFRDRPMSPLDTGIFWVEYVARHGGSIIRSPAMDLSWFQIALIDVFGTLILGLAVAAYLIKLILKKLFALLVRGTEAPTRYKKIN

SEQ ID NO: 8895 - protein, 524 aa, Neodiprion lecontei
MVARRTIVAAIICILNCAVEFIDCYRILCICPRASISHQVVFRSFTLALNKRGHEIIFVTSDPMNDPTLKNYTEIDISFLYKSNYITVLDVKDWFGSFYKLSGMANLQTDQILQHPEFRKIYTAGSNENFDMVLLEMLYWPALFVLGKRFDAPVIGLSPMGLTMNVQYVLGNPIMTSHPSNWELYSKSPPLTFWDRLGNFVSFWRFLHYYKNNHVTEQAAIARKYFGEDIPDLEELEKNVSLVFANQQTPISFSRPEVRKIVEIAGFHVSPQSKPLPKDIKKILDGATQGFIYMSLGSNMKSSMLSNETRNELVAAFSKLPYEVLWKFENDVLPDKPKNVHILKWTPQQAVLAHPNLKVFVYQGGLQSTEETVSHGVPVVGIPTWGDQRMQIDKMVSLGVGKKLELRTMNRNEIEEAIRTVASNKRYKDEMVKLSTLLKENSQHLLENAIWWTEQVLRHKGTSHLHSITADDPWYRRQDMDLIVFISVGTTVVLILICYVSHKLLTVIISAWKSPSLDRKKKWK

SEQ ID NO: 8896 - protein, 531 aa, Caenorhabditis brenneri
MFCVLTPLVLFSFGNYVDSYNFLIISPVYGFSHMKFLANIANQLAEQGHQVTYFQPFVIEAYQNHNLLKNNSIELINYWHDEEGHKHMPPGNDLHDAWYSGKYQSALAAVLEMPQFFYSAWNHMCRKIFEDTELHVMLKQKDFDVVIGETFDFCGLYLADYIESKSIISVFSGSRLLSITTPLGDPSWLHYLPAPSSETFGPGASIFDRINDLYHKYVFGSGYSIVFDWQYNQVARMTNGKVRNWKKILRDVTFHFSNSNPYLDFSVPTIPKVIPIGGFDMEETVDSSLPEEYEELLNKRPMTVFVSFGSMVKSKFMPDSYKESMLRMFSANSRNITFLWKYEDLKDQFLTNRLPENVILNEWFPQRALLADKRVKLFITHGGLGSTMELAYSAKPAIMIPLIAEQPDNGQMLKRHGSVEVYSKYDIPDWQKLNRLLHKMLNQKSYQKSADRLAHVLSSQPIKPSEMMIKHAEMAAKFGRMPELTPNVQEMGIVEFYNLDIILLLLTFCSIIGYLFLRYMVVNLNLKTKLE

SEQ ID NO: 8897 - protein, 831 aa, Camponotus floridanus
MPFKNLMEAVVQLNLLDLEESIAWTAAHILNRELFKNPEMKKLYAIDSNEHFDAVIVEQGPTQISLNAFAYRFNAPLIGISSLDVFNHMRYTFGSLILPSHISNWQVNTLPESNMSFWRRLVNFYEVWKQMYKWANVHIPIEDAIVKEYLGEDLPHIVDITRNMSIYLVNKHPVLSYDRPEQRNVIFFHGFHIAKVPPALPKDLKQFLDDSTKGFIYVSLGTNVKWEHLPNNTFEFFLEVFSALPYKVVWKYDPDLLPGKFENILASKWFPQQSILAHRNIKLFIYQGGMQSTEETVYYGVPIIGFPIFWDQMYNVQYMTKLGIGVHLHSNNISKESIETAVHEVINNKRYKDRIKYVSKLYNDVPYDSLQNTVRWIEFVIRQNGTLFLRNSLSDETWYQRYDWDIIGFLAILIFIASLLILWTHQIVYRSLCLALNKRGHEIVIVTPRPMKDPTLKNYTEIDVSIVNPTVEEYKNQQSQMSPSELYKYSFDLINIMSDAIFNVPKFKELYKEDSNEKFDAVMVEAIAGLSTCTMAYRFNAPLIGVMSLGIHNHQRYVFGSPILPSHSSNWEVNALLGENPSIWQRLRNFIEVWSLIYYWTSNFITTEQETAKKYLGHDIPQVIDVMKNMSVLLVNENPVNVYPRPEQTNAIFFSGLHIQKTLSRLPKVSHPNIKLFIYQGGLQSTEEAVYYAVPVLGLSVVSEQEIRIKRLVSSGAAIYLPLNKITKECFHTAIHQILNDKSYKEKMTYLSYLFKDQPYDTMENALWWIEFVMRHKEVNILRFSESDNPWYQRYDIDIIALLSVILFMLTCIIVLIIFKILNFILNRIAF

SEQ ID NO: 8898 - protein, 522 aa, Microtus ochrogaster
MAKLQSWLLVSLFLTEVLLLEAGKILTIATLGGSHYLLMNRMSQILQDNGHNVTKLLNKIIYIPEFQKEEISYQVINLDLPEDQQEEFHKKLNLLLEELVRQRNAHGVLVNIYKVFGDLCSHFLGREDIMDSLRNENFDLLLFDYLDFCSYLIAEKLEKKFVTFLPVQFNYMDIVLPSHLSYVPVYGSRLTDQMDFWGRVKNFLMFIDFSLRQREIFSQYDATIQEHFAEGSRPVLSDLLPKAELWFVNSDFAFEFARPLFPNTVYVGGLMDKPARPIPQDLEDFISKFGDSGFVLVALGSVATMYQTKEFIKEMNSAFARLPQGVLWTVNDAHWPKDVRLAPNVKIMDWIPQNDLLAHPSIRVFVTHGGMNSIMEAIQHGVPIVGIPFCSDQPDNLVRIEAKKIGVSVQLETIKAETFALTLKEVIEDKRYKSAAMTARAIRRSHPLTPSQRLVGWIDHILQTGGGAHLKPHGFQQPWHVQHLLDVLLFLLGLTLATLWLLKKVLGLLLRPLCVARKEKKA

SEQ ID NO: 8899 - protein, 525 aa, Neodiprion lecontei
MRRVSVFLALLLCNVYFTRHVNGARILAIFPLEIPHQFFFFQEILWTLVEQGHKLDVISHYPLIRPHPNYENIIHLTGKGPRFTFNLTADTLDSLANKPVEYYAEQYGNKACELLALPEFKKLIEEPQTNPPYDLVITELLYANCYFAFGRHFKVPVVAVSMSALPPYISEPLGNPVNTAFVSEHIDGSILHMNFWQRFKNTLHTWWTNYRIRRVTEAQNSIVKTHFGPDMPDIRELERDLSLLLVNSHHSLNGVRPFTPAIVEIGGLHVRDDGTELPEELKAWLDSSADGFIFVSFGSLLAIENFPKDIIAELYSALAKIAPIRVLLKGAAPEALPPGIPTNVLALEVVSQRQVLKHGNIRAFVMQGGSLEIHEAVMFAVPFIGLPIFPEPQRNVKNCVEKGVAISMDFGDFTADKFTAAVSEIVSDAKYKNNIITLGRKFLDRPRSPLETAIFWIEYILRNGGDSLRSPAVKFSWWQLALLDIYAGITVAVIVVIYICKRLTLTVIRRLFRPHPTLPTSKKMV

SEQ ID NO: 8900 - protein, 425 aa, Diabrotica virgifera
MRAPFWGRSAHDKDVDTALNEICRIVTRCMKPTPLSNLYKAAGFAEPSTRRGVAEHIEKINRLLSGISSLGLFLHSHDALGNPTHPIVSPDMMLNFSGKLSFFDKVQSFLYNIWYRMFYYWYALPKADKIARKYFGDDMPYLGDLEKNISLLLLNVNPIIHNVRPNVPNVIEINQMHIKKRKPLPKDIQDYLDSAPQGVVYFSLGSNVKSANLTEQIRKEIVAGLGALPYKVLWKWETDYLPNKPDNVMTKKWCPQQDILAHPNIKVFVMQGGLQSIEEAITLEVPLVGMPFVTDQPSNIKRIVELGLGVKVDHKTLTRDILKDAIMEVAQNPKYKEEVKKAKSILLDQPMKGVEKAVWWIEYVIRHKGARHLRSPAADMTLLEYFMVDVVLFLLTCVVVALYSVYKLLSVLRAMLRSSQKIKKQ

SEQ ID NO: 8901 - protein, 525 aa, Trichogramma pretiosum
MARSWIVALLLLAASLSSSHGLRILGIFPLQGKSHFIMGEALMRGLAAKGHRVDVYSHFPLKKPIPNYTDYSLAGTLPALANNMSFNYMNSITGVGSMSKDMELIGNPVCELLNLPIFQNLIKNPPNDPPYDLIIIEMFLSNCYLALGPHLNVPMVSMVTTSLFEWMYRPLGNPSRLAVEPTMYSGAHHPMSFKDRVRNVLLSHYSECSFNAEARKSQNAVVERAFGPGTTDVIDLQKEISLTLVNYHHALNGVRAFTPSVVPVGGIHIFENEDNALPVKIKKFMDESKDGFVYVSFGSMVQLETFPEHDLKELYASFKNIAPIRVVMKIAKPELLPSGLPSNVVTHSWLPQVQVLKHKNIKAFVTHGGLMGTQESIYYGVPLIGFPLFGDQHFNIDSYTKKNLAIRLDRYNIKEETLTAAIKEIINNPQYKNSADKASKAFRDAPLSPLNTAIYWVEYIAKHGKYSLRSPIVNLPWWQASLLDVYAFLATIFMLLVVTLYKLVAILLKLIFKFQKSKPRKMKKK

SEQ ID NO: 8902 - protein, 511 aa, Bicyclus anynana
MKLATLLLAVASLTTTSAYHILCVQNVPSKSHYHLMKGLVDPLLEAGHQVTLITTFPGSKPVPNLTYIDVSHIQDLVKHIDMTHQQSQGLDIVKQFARNISRSSLETPAVRDTLTRGQFDAVITEWFFSDMDAGYAAVLQVPWIQLSGMVLHTHMEYLVDAVRSVPTIPAMVNDYDVPMTLWQRLMNSFAYLYFSYHTTWDQSSVQANYEQYFAPIAAARGVALPEFTSAMRNISVLFVNSHPSFAPAMPVPPNVVDIAGYHIDEVVPPLPKDLKDLLDSSPQGVVYFSMGSVLKSAALPEQTRKDLVKMFSELPYTVLWKFEEKMEGLPKNLHIRPWMPQSSILSHPNVKVFITHGGLLSTLESLQFGVPVIAVPVFGDQPSNARRSVRAGHALMVPFHPPDMAADLKVALHETLSNSSYYKRAQQLSKLFRNRPVSNKKLIQHYVELAIETKGAYHLRSKSLLYSWYQLWMLDQLAVLVLALLLIITLIKRGINRFTKKPVKGKKDKRN

SEQ ID NO: 8903 - protein, 533 aa, Laodelphax striatellus
MNMMKLLNFFVFVLVVLQSGFEKCKGYNILCIFPSVSYSHQKPMLAVSEALARKGHNVTAITLNPNKKMNLKNYRQIDANSLYGIWAKLHSDVGFSLQKRMTAFEVVKGFAASTEHFNRALLYHPAIDGFAREIEATNATYDVVIYEAIIYTSLIGMVLQNGAPLPPTIGLLTLSVFSDADWYMGNPLAEAYIPTLNTPFTDHMTFYQRLYSLAIILYTWYELSYRSRPIQEALMKERYGAGLPSIEEIERNRSMLFYLNDFTTSYLRPVQQNTVFVGPINVENQPVDALPQDLQKWMDEAEEGVIYFSLGSNMKGTSFPAEKRAAFIEAFSRLDKIRVLWKWEDEKLPNQPNNTLIRKWFPQNSILAHPKTKLFISQMGHQSSQEAINFAVPMLGIPIYGDQQQNAQKLEREGVSLFLDIVDDNFNSDVYKNIQRILSDNTFKQNMIRLQWLSRDKPMSAADTAVWWVEYVARHKGAAHLRPAVLDLPWYQVYLVDIFLFFTIIFSVMILFLYMLLKILFCRSNISKKVKVN

SEQ ID NO: 8904 - protein, 526 aa, Jaculus jaculus
MAGPRSLLLVSFFLGGPLFSLAAKILTISTLGGSHHLQMQKISQILQEHGHWVTNLLYNKDLTSGIIKNINMKEVSYRVIPWSVPEEQQEKFNDILDFLYQKAVDGRSSINDYIRLFEHFGNSCRHLLSRRDLMDSLRNENFDLLVFDSADLCSFLVAEKLEKPFVVFIPVMFSYVDYGLPSSLSYVPVAGSLLTENMDFWGRLRNFLTYLVYSMNQRLFHSQFDNTIQEHFAEGSRPVLSHLLRKAELWFVNSDFGFDFARPLLPNTIYVGGLMDKPVNPLSQELEDFIAKFGDSGFVLIAQGTILSMYQTKKHIEEMNKAFSDIPQGVIWKFNCSQWPEDVKLPANVKMMDWVPQNDLLAHPRIRLFVTHGGINSIMEAMQHGVPIVGIPVTADQPENMLRVEEKKFGVSVHLQNLRAETLALKMKEVIEDERYKSAAMAARAIMRSQPLTPAQRLVGWIDHILRTGGAAHLKPYAFQQPWHEEYLLDVLLFLLGLILGTLWLCWKLLGFATRWLRGARKLKKT

SEQ ID NO: 8905 - protein, 520 aa, Peromyscus maniculatus
MAEHRIGILVSLFLLDVLLLDAAKILTLSTAGGSHFMVMSRVSQILQDHGHNVTNLLNEKLIILDFKEKISYEVINWHLSEDELKETDNRRQLLCEDIVHRSNHHTNIKMFEYFADLCSHLLSRNDIMDSLRNKKFDLLFLDVTDPCVFLIAEKLGKQFVAFLPSLFSIIDYGLPNPLSFVPGFGSILNDQMDFWARVKNFLMFLDSSMKKREIFSQYDSTIQQHFAEGFRPVLSDLPRKAELWFVSSDFALDFPHPVLPNTIYVGGLMDKPVRPIPQDLEDFIIKFGDSGFVLVALGSLATQYQTKELIKEMNSAFARLSQGVLWACKDALWPQDVRMAPNVKIMDWLPQTDLLAHPRIRLFVTHGGTNSLMEAIQHGVPMVGIPFFLDQPKNMVLVEAKKIGVSVQLETLKAETFALTLKEVIEDKRFKSAAMAARAIRRSHPLTPSQHLVGWIDHILQTGGGAHLKPHGFQQPWHVQNLLDVLLFLLGLTLGTLWLLKKMLGLLLRSQGVVRKEKKS

SEQ ID NO: 8906 - protein, 481 aa, Neodiprion lecontei
  MOD_RES (336)..(336): Any amino acid
MDLANRGHQIDVVSHFPLMYPFHNYRDIVDLNGKMDVMANTMTFETVEHVGNVALEEYGAQKVGNDLCDILGIPEIQELINNPPKDPPYDLVIAEFFFANCFFAFGRHLNVPVVAMTSAPTLHYSNEPLGNPLNPAIVPEYEDGSIIHMNFWQRLRNTLYTFNRIRRIRSLTEVQNDAVKKYFGSDMPGVRELERDVALLLVNSHHSLNGIRPMTPAILEVGGIHIRFENVELPADLRNWLDNSTSGFIYACFGTLLRIESFPKEFLAELYSGFTKIAPIRVLLKSTNPEELPPGLPQNVMTMKWLPQAEVLRHKNIRGFVTHGGLGGIQEATAFXVPFVGIPIFADQPRNVKNCVEKGVAVSLNYKDFTADKFVSAVNDIIHDPKYKNNMMILSKKFMDRPLNPRDAAIYWIEYIITYGGDSLRSPAVRLTWWQLALLDVYGSILVAALVTIYLVKLFISALIRRIVRSKETVPLTKKKN

SEQ ID NO: 8907 - protein, 523 aa, Jaculus jaculus
MAGPRALLLVSFFLGGPFFSLAAKILTISTLGGSHYLQMQKISQILQEHGHWVTNLLYNKDFVKPDAQKKEVSYQVIPWSVPEEQQKKFNDFRDFLYQKAVDGRSTFNDYLMLYEHLGILCSHLLSRRDIMDSLRNENFDLFVFDSIDLCSFLVAEKLEKPFVVFLSVTFMYVDFGLPNPLSYVPVTGSFVTENMDFWGRVRNVLMYFVFSMKQRLIHSQFDNAIREHFAEGSRPVLSHLLRKAELWFVNSDFGFDFARPLLPNTIYIGGLMDKPVNPLSQDLEDFIAKFGDSGFVLIAQGSILSMYQTKKHIEEMNKAFSNLPQGVIWKFNCSQWPEDVKLPANVKMMDWVPQNDLLAHPRIRLFVTHGGINSIMESMHHGVPIVGIPVTADQPENMLRVEAKKFGVSVHLQNLRAETLALKMKEVIEDERYKSAAMAARAIMRSHPLTPAQRLVGWIDHILQTGGAVHLKPYAFQQPWHEQYLLDVLLFLLGLILGTLWLCWKLLGFATRWLCGARKLKKT

SEQ ID NO: 8908 - protein, 526 aa, Athalia rosae
MRGSWCFLILILNFLALFCNGYRILGVFPFNGKSHFVMFERLMKGLAVRGHRVDVVGHFPLKKPFPNYNDIVSLDGTLPNLVNNVTLDFVEKIRNVYSPATTISTVFGTELCHLMDHPRFKNLIQNPPGDPPYDLAVVEIFGANCYLALGHHFGVPVVGIVTGLMFPWINKLVGNPDNTAYVPNSFSSFTGSMNFWERVENTASHFAMNWKFDRGASRQDDLIKKYIGPDALSVEEARKNISLVLVGSHYTLNGPKPLASSVIEVGGLHIEENESTLPDDLKNWLDGSDEGFVYVSFGSMVKIESFSEETIAALYASLRKLSPIRALVKIAEPEQLLPGLPSNVMTSPWIPQVAVLKHKNIRAFVTHGGLMGTQEAVYAGVPMIGIPLFGDQDQNVRLYVKLKLAVNLNLYEITEENLDAAFDAVLRDPTYKKSAKIMSKKFRDRPTSALETAIFWIEHVVRDGGSALKSPAIHLTWWQISLLDVYAFFILLIAVIGSITLAAVLKLKKLFRHQGIKIALTRKKVT

SEQ ID NO: 8909 - protein, 408 aa, Caenorhabditis brenneri
MFEDTDLHYDLKSRQYDVVMSEAFDFCGLYLASYLEMPSIISTFTGNRLNALAPVLGEPSFLHYLPAPTSQYGQKSTIWDRANDVWHKIFSSYGFAQLFELQYEQVKKLTNGKVKHWKEIIHDVTYHFSNSNPYLDFVIPTIPKVVPIGGITVDQNSWDVKDNHSEELERLLDERKHTVFISFGSMVRSVDMPSEYKDSMIKVFNDHPNITFLWKYEVPNDQELLKKLPRNVHLAKWFSQNALLSDRRVDLFITHGGLGSTMELANAAKPAIVIPLFADQPGNAKMIERHQSVEVYSKLDIRNWKKLSNLLRKMLNTEVYQEHANRLADTLRFQPISPADLMVKHAENAARFGRMPNLVPYAKDMGIVEFYNIDLILILGLISTLVVFIISIICTKLKGLLTFKLKVE

SEQ ID NO: 8910 - protein, 990 aa, Caenorhabditis briggsae
MWLFGSIVQIALLYNLVLPTANGELADEFEHYRECLEKVEKDVGEERKIKVVHAVRGADVILPCFTCVSPEDGVEIDSTYKPSAGSVGRSLNYIVDFFKEKFLRSSFSMPDENRWKFDWEFAMMGRMFVPLSSMHFDASESISDRIHRFTSKDEAEFKLGDRYELVLKNVDGNSTGHYRCMNRHGRNVISNMYFLEVSNEKNIIPLNGTIGVEKLPSVALKSGKLEKLNLKYSVKATDWSKCSYCSSDRGEQTRSIKCYVEPSTKTTSQKLELRYLLLYDKIPCTSTLVPLPVRKELKKMGNDKIFLETRPCFEECTGAEELNRIVNSSQDLGDIRTLDYLPGGEFVFGNVLPRLLPPVVRRVQLVLSNDPQVLSCQKLIDLNTGVHWYSLKNGPIQHSTIHEMYQERAYFDEDTNLVFRQFTMEDDDEYFCYSSNNILLGTFHMRVVESDQHHQVIEVVMHVPLLFLLLLFATSSTTSCFKILVSVPKFGYSHMNTMGKLADILVESGHDVTFLMPVDVPIPQNGTELAKVVLVPPTDEISKIMEASMKDGAVANLWTHSANSKQGIMWSTDMIGIVSYHNTKNMISNKALVQQMKDEKFDIGITELFDFSGLSFFEVIGLKNVIGAHTTSVFEGTLMATGAPILPSFVPASQTFTDDSGSILSRLNNLYMTYWSYEFQNKIQGFAQKALNEHYGKGKAPKIWDLVKDITWFFVNSDPIFDFPKPLPLNIIEIAGISVSKIHPLDKEWDEILSKRSKNVLVSFGSIASPTTMPEAVKKSIVDTFAAFPDVTFIWKYDDTESGITSHLNNVHIVKWMPQNDLLADKRVSMFWTHGGMGSLMESAQKGVPLVVVPIFGDQMRNAQIAKRHGVAVIYDKMELSNTKKLIGTLKEVLENPEYKKSADLLAQILAYERVSPKQKIVDTIELAGRFGQLPRWTSSGKQFSLLKYFNLDLVLFAIFLVFGILVSFVLLVRLILVKLGFSGNKEKSE

SEQ ID NO: 8911 - protein, 520 aa, Musca domestica
MDIRSILLIALFMSFAIFKSVEGAKILSIFPYSGPSQYIFISPLLKALAEKGHEVTSISTFPQKKPLKNFRDVVVMENSNIFDEMFTQATAGEAEGKSFFEEFAELSSLGVTASSNVMENVDVKKLLKNEKFDLIIIEVFGTESLFGLGEYFQAAMIGVSTFELTANPSPASYIPHMSLEYDSHMSLWQRTVNILTNVVDNLCTNFFLIAGQEKVYKKYFPNAKLSLDEARRNVSLVLLNDHFSLQAPRPYVPNMIEVGGLHIKQKPDPLEEDLQKFLDDSPEGVIYFSMGSNAKSKDLAPHTLQAILSTFAELKIKVLWKFELEELPNKPANVVIRKWFNQPSILAHPNVKLFISHGGYLSTTETIFHGKPILGIPVLGDQFMNVKNAVKAGFALRLDLRSLTKEKFMQSIQELWTNPRYTNAVKTLSKRYRDQPLTPMETAIFWVEYVLRHDGAPHIRNAGQDLSYWQYHNIDVYLLLASCIVVVFTLIASLIRFGKKIICAASKSMKKSKKSKIKKN

SEQ ID NO: 8912 - protein, 1063 aa, Camponotus floridanus
MWSKIYLFSIYTILYGIVQYNVTHAKRILVITNFPSYSHQIVYRNLCLELNKQGHEIVSVTTDPIKNSSLTNYREIDLKYFYKGFLEYKKMPFKNLMEAVVQLNLLDLEESIAWTAAHILNRELFKNPEMKKLYAIDSNEHFDAVIVEQGPTQISLNAFAYRFNAPLIGISSLDVFNHMRYTFGSLILPSHISNWQINTLPESNMSFWRRLVNFYEVWKQMYKWANVHIPIEDAIVKEYLGEDLPHIVDITRNMSIYLVNKHPVLSYDRPEQRNVIFFHGFHIAKVPPALPKDLKQFLDDSTKGFIYVSLGTNVKWEHLPNNTFEFFLEVFSALPYKVVWKYDPDLLPGKFENILASKWFPQQSILAHRNIKLFIYQGGMQSTEETVYYGVPIIGFPIFWDQMYNVQYMTKLGIGVHLHSNNISKESIETAVHEVINNKRYKDRIKYVSKLYNDVPYDSLQNTVRWIEFVIRQNGTLFLRNSLSDETWYQRYDWDIIGFLAILIFIASLLILWTLFQILRFHLRMLSNSLRQYESALIRALNSDKMYKVICRICVILSLWLLLTNNIANAERILVITFAPFYSHQIVYRSLCLALNKRGHEIVIVTPRPMKDPTLKNYTEIDVSIVNPTVEEYKNQQSQMSPSELYKYSFDLINIMSDAIFNVPKFKELYKEDSNEKFDAVMVEAIAGLSTCTMAYRFNAPLIGVMSLGIHNHQRYVFGSPILPSHSSNWEVNALLGENPSIWQRLRNFIEVWSLIYYWTSNFITTEQETAKKYLGHDIPQVIDVMKNMSVLLVNENPVNVYPRPEQTNAIFFSGLHIQKTLSRLPKDLEQFLNNATEGFIYVSFGTTIVCRSLQNEMLENFIEVFSKLPYKIVWKFDCDKLSKKSDNVFISSWFPQQSVLAHPNIKLFIYQGGLQSTEEAVYYAVPVLGLSVVSEQEIRIKRLVSSGAAIYLPLNKITKECFHTAIHQILNDKSYKEKMTYLSYLFKDQPYDTMENALWWIEFVMRHKEVNILRFSESDNPWYQRYDIDIIALLSVILFMLTCIIVLIIFKILNFILNRIAF

SEQ ID NO: 8913 - protein, 396 aa, Fopius arisanus
MELKCLVLIINFLVINSVMESESHRILAIFPFQSRSHQMMFDALVKGLVNKGHLVDVATVYPLKKPPKNYTVVVNLEGKQESLVNKWNVEFASKLGQDTLPIIALPFGNGLCEYLALPEMQEIIKNPPQDPPYDLLMVESFGANCFIGLGHVLNVPVIMVSSTIPLPWLETSLGQPQYPAFVPAFFTNLQHPMSFLERVINTVKTYSNNLRYDYYTETVQNEQMRKYIHPDTPPLRQLEKDVVLALVNSWHSLNGIQPVTPGVIAVAGLHVEANYVPLSKELEKWLNDSTSGVIYFTLGSMVNIETFPDETMRAIYSVFRGIAPVRVLMKVANKTALLPGLPDNVMTSSWIPQVAVLAHKNTRVFITHGGLMSTQEALTYGVPLIGIPLFGDQHNN

SEQ ID NO: 8914 - protein, 430 aa, Diploscapter pachys
MNPQLSMSIFNTTAARRYIIVEALSTNATEEFIKQERYDIGLTTDYEFCGHVILFKNGLSSIASYSAMPIIPETIFAAGLPSPASSFTPFQPPVNPYSIWSRFMNAIRLGEAYYIDMKWITDEFTKIAREKYGPDFPDVEQLIYKLDVIFVNSNQVFEPARPISHKTKYIGGIALKQPKPLNEDMNEMLSKAKRGNVIVAFGSQILTKAMPFELRRHFVRAFNKFPEFSFIWRYDEMEDDDVLFENSTNIHRIKWLPQIDLLNDERVVGFVTHAGLNSILEASFAGIPMIAIPIFADQPYNALSGKQRGTTFIIDKVNVNEDTLAEGLSAILYDESYMENAKRISKLMKENPEQGKDVFINWVEYAANNKELYKINSLPGSDLTPFTYYLIDVTILCTIASLLVLYLVLKTILFIYKFVSLKMSQKVKVN

SEQ ID NO: 8915 - protein, 513 aa, Helicoverpa armigera
MKITLVLLLLCLTNSLAYKILCIFPAASKSHDHLSKGVVDALLKAGHEVTWATPFEKKNVPKNLRIIDLTATRAIVEGVDATDTENHSISFVRNFTTVMSRTASENPTLRKVLIEQQFDAVMTTWAFNDFDAGYAAIQQVPWILLSSVGVHPYLESIVDVVRSIPTTPMIIADGEVPMTWQRRWLNGLIYMLMTVDSWFDIPRQAALYESMYAPIAAARGVPLPPFLEAKHNVSILLVNSRESIGTAYSLAPNVVNIAGYHIDENPAPLPKDLQDLMDNSPQGVIYFSMGSIVRSTAMKPHTRDALIKIFSKLPYTVLWKFEEPLDNLPPNLHMRPWMPQTSILAHKNLRLFITHGGLLSTLEAIHVGVPLLAVPVFGDQPGNAERAQRTGYAVRVNYHENMAPELEVALNEMLSNDSYTKKVKHLSKLFRARPISPSKLISFYVELAIETKGAYHLRSLALQYSWHERWMFDFVLAVLGVLAALAWLVKLAVTACVRRFSGKKQSANKKKKN

SEQ ID NO: 8916 - protein, 508 aa, Strongyloides ratti
MINIADFLAENGHNVTIIHAPMNPKTIDNQGKKATVVRPSTYDKKIKDIFDIADKNLKEIWNIDSLWNPYYTLTFISIYNKWLAASCEHIIKEDNLTELIRNEKFDLGIGEAFVPCVFGMFKYYNITKHVAVMSGIPYDTHYNEMGINFPIGQVPSIFAPISENMSFMERLYNTFFYLTSKYLHREGVYLGNDIFNKHAPTYNINLENIFNECIFYISNTDPIINYGVPGSPKMIQLGGFLLKQPSPLNSYFDNLLNKRKKNVIISFGSFAKSINMPKEGLNTLIELFKSFPNVTFIFKYEEENSLFLKNFDNVITTKWLPQYNLLNDKRVSVFIMHGGMNSLLESSRAGVPMLGIPLFYDQPRNAKIIGELKLGRWIDKFQFIKDKNLFINTFRDVLENPLYKKSIKKISEMIRKKPYNEKELFLKYIEFACQFGEIRNFNIGSKKKLLYQYSMIDIYLFIIFSFYGSIYWVYLFLKYIWFFLVHIYYSMYNKYESYKKNKSKEKKQ

SEQ ID NO: 8917 - protein, 518 aa, Ochotona princeps
MLLLGCFLLSGALFSDAAKILTVATLGGSHYLLVARVSQILQDHGHNVTMLHQGGNSLMAGFKEEEKSYKVTSWIPPQDHQKEFNKCFDNFMEEALHGRGTFENLLKLMEQLGFQCSHLLRRRDILESLRSENFDLIVVEIFDYCPLLLAEKLGKPFVSLLASSFGALDFGLPSPLSYVPVFSSLLTDHMNFWGRVKNFLTFFGFSMKQRKLQSMFDNSIKEHFREGSRPILSHLLEKAELWFVNSDFAFEFARPLNPNTVYVGGLMVKPIKPIPQDLENFIAKFGDSGFILVALGSMVSTYETQEILKEMNSAFAQLSQGVIWKCKHSHWNKDVKWAPNVKVMDWLPQSDLLAHPSIRLFVTHGGQNSIMEAIQHGVPMVGIPLFGDQPENIVRIEAKKLGVSIQLHNLKAETLALMMKQVIEDKRYKAAAVAASVIRHSHPLTASQRLVGWIDHILQTRGAAHLKPYASQQQWHEHYLLDVCLFLLGSTLGSAWLAGKLLSMVAKWLRGAKKLKEM

SEQ ID NO: 8918 - protein, 512 aa, Heliothis virescens
MKATLAVFLLCLSSTLAYKILCIFPAATKSHDHLSKGVVQALLKAGHEVTWATPFEKKNVEKNLTIIDLTATRKIVDGMDMTDTKTQSISQIKNFTTVMSKTASETPALRKVLVEQQFDAVITTWAVNDFDAGYAAIQQVPWILLSSIGIHPYLENLVDEVRSISTTPLIFNDGEVPMSWGRRWINGLVYMLMCVDGWFDNRRQAALYESMYAPIAAARGVPLPPFHEAKHNVSILLVNSHESIGWTYSVPSNVVNIAGYHIDENPPALPKDLQDLLDGSPQGVIYFSMGSIVRSTAMKPHTRDALIKIFSKLPYTVLWKFEEPLSNLPSNVHVRPWMPQASILAHKNIRLFITHGGLLSTLEAIHAGVPLLAVPVFADQPGNAERAQRAGYALRVDYHEDMAPKLEVALNEMLSNDTYTKKVKYLSKLFRARPVSPSKLISFYVELAIETKGAYHLRSLSLQYSWYERWMLDFVLALLGVLAALAWLVTLAVRACVRRLSGKKQGADKKRN

SEQ ID NO: 8919 - protein, 500 aa, Apis mellifera
MKLSSIVFLCAILSACYGYRILGVFPFNGKSHFMMFERLMKILAKKGHQVDVISTFPLKKPYPNYTDLIALPVSSSWINNLTFHEIQNSFLVSAPFVVGHMAGNMICEFLKHPKVQELIHNPPKDPPYDAIILEVFGAHCFGIIADILKVPMIGVSSSVLYPWSYDYIACPHNLAYAPHNLLFYSQNMNFWQRMYNFLDNLYSIWAFNRVTVPQTEIMRKYVKPDAPDIRDLERNMSIILVNSHISTNGIKNLNPALIEVGGLHVHDDETVLLPPSLEKWMNESEQGFIYFSFGSMVMIESFPIETLRIFYNSMRKIAPVRVLMKIANSDKLPPGLPENVYILPWIPQVKVFKHPNIKAFITHGGLMGSQEAIHYEVPMIVKLKIVSLTQEEMDHALNEILNNPKYKKAIKELSKKFLDRPMSSADTAIYWIEYIIKYGSTVLRSPAMDLTWWQLELLDVCGFLLIVTLVVLYLLALGLQFVYHRLVNSSFVVPQKKKIS

SEQ ID NO: 8920 - protein, 568 aa, Toxocara canis
MYFSDLLLIFPLRAEHSQQIVKESFSLLSRSEHFSNAKRMIVRLIVIAWSLLFVSHGLKILVYQTALSRSHLMYSGGLVDILVDARHEVHKLIANWNPTISDNGTKKATSVYRFTLSKPSPWLKINHFSEPFEAKVINYHMDSREAALHWQTIAEFCKEMLADEKLLHWLQNSNFDIAISTTYDFCVFGLFHVAKIKPVIGFLVTPISDIVLYALGISNPASYTQDSFYPSDNGDQMTYLQRVNNLYTRTLMQQIYIPRFIAMQDEIFHGKFGKRMPSLQTLFSQMSYIFVNAHPLVDYPRPLSHKLIFIGGIQLNDAGQLPQEFDRVLSMRPDGAVLVSFGSTALTSKMPKNLKRIFLEVFAAFPQLTFFWKFDEPHDKSSFTNISNVYMAKWLPQKQLLGDKRMKAFITHVGLNSLMESIHEGVPLVGIPLFADQLHNAGIIRKRQIGIVIDKRNITVENLRNSLNDVLYNDRYRQTAKMLSAMIRKNPNNPTKTFLKYVEFTAQFPNVGEYLQLQSTNLSSVEYFCIDIIVPFIFIAITLLYFCFKALLIILAKCMQREAKDKFE

SEQ ID NO: 8921 - protein, 526 aa, Nasonia vitripennis
MKFIQTICLLLSVINLGSVCRAYRILGVFPFNAKSHNIVFEALMKGLAKRGHQVDVVTHFPLKNPVKNYNEIINLDGSLENLVNNFTIEFVSKITGDIVDLIATSYGNRVCQIMGFESMQKLIKNPPTNPPYDLVITEAFGANCYMGLGYVFKVPVVAVSSAVEYPWISHFIGNDDNPAYVPNAYYVSTGKMNFWNRLKNAVINLIETRKFHVLTEDSQTESMRKYLSPDIPNIRQVEKNVALTLVNSHPVLFGVKPITPALVQIGGLHIEGNDEILPTELKKWMDDSKHGVVYFTLGSMVLIETLPEAQIKEIYASFRKISLVRVLMKIADASKLPPGLPDNVKVLPWIAQQPVLAHPNTKVFITHGGLGGLQEALYFGVPMIGIPLFSDQFRNVAAFVAKQMMIKIDFNQFSGELLDSSLQALLHNSVYKKKSMYYSRLFRSQPISPMNNAIYWIEYVIQNGDDSIRSPALQFFWWQLARLDVFGFIFLVIISSMSVIIIGIRYAVIKAFRMSQIRVPDKKKIR

SEQ ID NO: 8922 - protein, 1068 aa, Zea mays
MAGNEWINGYLEAILDSHTSSRGAGGGGGGGDPRSPTKAASPRGAHMNFNPSHYFVEEVVKGVDESDLHRTWIKVVATRNARERSTRLENMCWRIWHLARKKKQLELEGIQRISARRKEQEQVRREATEDLAEDLSEGEKGDTIGELAPVETTKKKFQRNFSDLTVWSDDNKEKKLYIVLISVHGLVRGENMELGRDSDTGGQVKYVVELARAMSMMPGVYRVDLFTRQVSSPDVDWSYGEPTEMLCAGSNDGEGMGESGGAYIVRIPCGPRDKYLKKEALWPYLQEFVDGALAHILNMSKALGEQVGNGRPVLPYVIHGHYADAGDVAALLSGALNVPMVLTGHSLGRNKLEQLLKQGRMSKEEIDSTYKIMRRIEGEELALDASELVITSTRQEIDEQWGLYDGFDVKLEKVLRARARRGVSCHGRYMPRMVVIPPGMDFSNVVVHEDIDGDGDVKDDIVGLEGASPKSMPPIWAEVMRFLTNPHKPMILALSRPDPKKNITTLVKAFGECRPLRELANLTLIMGNRDDIDDMSAGNASVLTTVLKLIDKYDLYGSVAFPKHHNQADVPEIYRLAAKMKGVFINPALVEPFGLTLIEAAAHGLPIVATKNGGPVDITNALNNGLLVDPHDQNAIADALLKLVADKNLWQECRRNGLRNIHLYSWPEHCRTYLTRVAGCRLRNPRWLKDTPADAGADEEEFLEDSMDAQDLSLRLSIDGEKSSLNTNDPLWFDPQDQVQKIMNNIKQSSALPPSMSSVAAEGTGSTMNKYPLLRRRRRLFVIAVDCYQDDGRASKKMLQVIQEVFRAVRSDSQMFKISGFTLSTAMPLSETLQLLQLGKIPATDFDALICGSGSEVYYPGTANCMDAEGKLRPDQDYLMHISHRWSHDGARQTIAKLMGAQDGSGDAVEQDVASSNAHCVAFLIKDPQKVKTVDEMRERLRMRGLRCHIMYCRNSTRLQVVPLLASRSQALRYLSVRWGVSVGNMYLITGEHGDTDLEEMLSGLHKTVIVRGVTEKGSEALVRSPGSYKRDDVVPSETPLAAYTTGELKADEIMRALKQVSKTSSGM

SEQ ID NO: 8923 - protein, 1043 aa, Arabidopsis thaliana
MAGNDWVNSYLEAILDVGQGLDDARSSPSLLLRERGRFTPSRYFVEEVITGYDETDLHRSWVKAVATRSPQERNTRLENMCWRIWNLARQKKQHEEKEAQRLAKRRLEREKGRREATADMSEEFSEGEKGDIISDISTHGESTKPRLPRINSAESMELWASQQKGNKLYLVLISLHGLIRGENMELGRDSDTGGQVKYVVELARALGSMPGVYRVDLLTRQVSSPDVDYSYGEPTEMLTPRDSEDFSDEMGESSGAYIVRIPFGPKDKYIPKELLWPHIPEFVDGAMSHIMQMSNVLGEQVGVGKPIWPSAIHGHYADAGDATALLSGALNVPMLLTGHSLGRDKLEQLLRQGRLSKEEINSTYKIMRRIEGEELSLDVSEMVITSTRQEIDEQWRLYDGFDPILERKLRARIKRNVSCYGRFMPRMVKIPPGMEFNHIVPHGGDMEDTDGNEEHPTSPDPPIWAEIMRFFSNSRKPMILALARPDPKKNITTLVKAFGECRPLRELANLALIMGNRDGIDEMSSTSSSVLLSVLKLIDKYDLYGQVAYPKHHKQSDVPDIYRLAAKSKGVFINPAIIEPFGLTLIEAAAHGLPMVATKNGGPVDIHRVLDNGLLVDPHDQQSISEALLKLVADKHLWAKCRQNGLKNIHQFSWPEHCKTYLSRITSFKPRHPQWQSDDGGDNSEPESPSDSLRDIQDISLNLKFSFDGSGNDNYMNQEGSSMDRKSKIEAAVQNWSKGKDSRKMGSLERSEVNSGKFPAVRRRKFIVVIALDFDGEEDTLEATKRILDAVEKERAEGSVGFILSTSLTISEVQSFLVSGGLNPNDFDAFICNSGSDLHYTSLNNEDGPFVVDFYYHSHIEYRWGGEGLRKTLIRWASSLNEKKADNDEQIVTLAEHLSTDYCYTFTVKKPAAVPPVRELRKLLRIQALRCHVVYSQNGTRINVIPVLASRIQALRYLFVRWGIDMAKMAVFVGESGDTDYEGLLGGLHKSVVLKGVSCSACLHANRSYPLTDVISFESNNVVHASPDSDVRDALKKLELLKD

SEQ ID NO: 8924 - protein, 805 aa, Nostoc punctiforme
MYELVQAVFNGDEKTALHQLIYTLSASGKRYLLRNEILQAFADYCHESQKPAYFYHSSSIGKLIQYTHEIIIEEESTWFVIRPKIANQEVWRLTANLDSFEQMTQQALLDVRDRLVNRYQPGILEIDLHPFYEDSPRIDDPRNIGQGLAYLNRYLCNQLLTDPEYWVEMLFQALQGLQHDGIRLLLSDRIPSGIHLAKQIKLALKLVNERSPHEPYEKFSLDLQELGFEPGWGNTAARVSETLELLDRLIYSPEPGILEAFVARVPAVFRVVLISIHGWVGQEDVVGRDETLSQVIYVLEQARSLENELREQIKLAGLDQLGIKPHVIILTRLIPNCEGTFCYLPLEKVQDTENAWILRVPFGEFNPEITNNWISKFEIWPYLEQFAIDAEKELLTQFKGKPNLLVGNYSDGNLVASLLSRRMKVTQCNIAHSLEKPKYLFSNLYWQDLENQYHFSAQFTADLISMNAADFIITSSYQEIVGTPDTIGQYESYKCFTMPQLYHVVDGIDLFSPKFNLVPPGVNESIFFPYSQKENRDSNLCTEIHNLLFSREDPQILGHLDRPNKRPIFSVSSISSIKNLAGLAECFGQSQRLQEHCNLILLSSKLHPDEATNPEEAEEIQKLHNIIDRYHLHSKIRWLGMRIPSSSLGEAYRVVADCQGISVHFARFESFGRSILEAMISGLPTFATQFGGSLEIIENQEEEFNVNPTDLVETAKKILDFFEKCNTHPEHWQEVSEWMSQRVHNRYNWHLYSNQLLLLAKMFTFWNFVAPENNEARDRYMETLFHLIYKPRAEKILEKHMGANS

SEQ ID NO: 8925 - protein, 806 aa, Vicia faba
MATERLTRVHSLRERLDETLTANRNEILALLSRIEAKGKGILQHHQVIAEFEEIPEENRQKLTDGAFGEVLRSTQEAIVLPPWVALAVRPRPGVWEYLRVNVHALVVENLQPAEFLKFKEELVDGSANGNFVLELDFEPFTASFPRPTLNKSIGNGVQFLNRHLSAKLFHDKESLHPLLEFLRLHSYKGKTLMLNDRIQNPDSLQHVLRKAEEYLSTVDPETPYSEFEHRFQEIGLERGWGDSAERVLESIQLLLDLLEAPDPCTLETFLDRIPMVFNVVILSPHGYFAQDDVLGYPDTGGQVVYILDQVRALESEMLNRIKKQGLDIVPRILIITRLLPDAVGTTCGQRLEKVYGTEHCHILRVPFRDQKGIVRKWISRFEVWPYLETYTEDVAHELAKELQGKPDLIVGNYSDGNIVASLLAHKLGVTQCTIAHALEKTKYPESDIYWKKFEEKYHFSCQFTADLFAMNHTDFIITSTFQEIAGSKDTVGQYESHTAFTLPGLYRVVHGIDVFDPKFNIVSPGADQTIYFPYTETSRRLTSFYPEIEELLYSTVENEEHICVLKDRSKPIIFTMARLDRVKNITGLVEWYGKNAKLRELVNLVVVAGDRRKESKDLEEKAEMKKMYELIETYKLNGQFRWISSQMNRVRNGELYRVICDTKGAFVQPAVYEAFGLTVVEAMATGLPTFATLNGGPAEIIVHGKSGFHIDPYHGDRAADLLVEFFEKVKADPSHWDKISLGGLQRIEEKYTWQIYSQRLLTLTGVYGFWKHVSNLDRLESRRYLEMFYALKYRKLAESVPLAVEE

SEQ ID NO: 8926 - protein, 1057 aa, Citrus unshiu
MAGNDWINSYLEAILDVGPGLDDAKSSLLLRERGRFSPTRYFVEEVITGFDETDLHRSWVKAQATRSPQERNTRLENMCWRIWNLARQKKQLEGEAAQRMAKRRLERERGRREATADMSEDLSEGEKGDIVSDVSAHGDSTRSRLPRISSVDAMETWISQQKGKKLYIVLISIHGLIRGENMELGRDSDTGGQVKYVVELARALGSMPGVYRVDLLTRQVSAPDVDWSYGEPTEMLTPRNSDDFMDDMGESSGAYIIRIPFGPKDKYIAKELLWPHIPEFVDGALNHIIRMSNVLGEQIGGGKPVWPVAIHGHYADAGDSAALLSGALNVPMLFTGHSLGRDKLEQLLKQARLSRDEINATYKIMRRIEAEELSLDASEIVITSTRQEIEEQWRLYDGFDPVLERKLRARIKRNVSCYGKFMPRMAIIPPGMEFHHIVPQDGDMDGETEGNEDNPASPDPPIWSEIMRFFTNPRKPVILALARPDPKKNITTLVKAFGECRPLRELANLTLIMGNRDGIDEMSSTSASVLLSVLKLIDKYDLYGQVAYPKHHKQSDVPEIYRLAAKTKGVFINPAFIEPFGLTLIEAAAHGLPIVATKNGGPVDIHRVLDNGLLVDPHDQQSIADALLKLVAGKQLWARCRQNGLKNIHLFSWPEHCKTYLSRIAGCKPRHPQWQRTDDGGETSESDSPGDSLRDIQDISLNLKFSLDGEKSGASGNDDSLDSEGNVADRKSRLENAVLAWSKGVLKDTRKSGSTDKVDQNTGAAKFPALRRRKHIFVISVDCDSTTGLLDATKKICEAVEKERTEGSIGFILSTSMTISEIHSFLVSGHLSPSDFDAFICNSGSDLYYSTLNSEDGPFVVDFYYHSHIEYRWGGEGLRKTLVRWASQVTDKKAESGEKVLTPAEQLSTNYCYAFSVQKPGMTPPVKELRKVLRIQALRCHVIYCQNGSRVNVIPVLASRSQALRYLYLRWGVELSKMVVFVGESGDTDYEGLLGGVHKTVILKGICSSSSNQIHANRSYPLSDVMPIDSPNIVQTPEDCTTSDIRSSLEQLGLLKV

SEQ ID NO: 8927 - protein, 977 aa, Oryza sativa
MYGNDNWINSYLDAILDAGKGAAASASASAVGGGGGAGDRPSLLLRERGHFSPARYFVEEVITGYDETDLYKTWLRANAMRSPQEKNTRLENMTWRIWNLARKKKELEKEEANRLLKRRLETERPRVETTSDMSEDLFEGEKGEDAGDPSVAYGDSTTGNTPRISSVDKLYIVLISLHGLVRGENMELGRDSDTGGQVKYVVELAKALSSCPGVYRVDLFTRQILAPNFDRSYGEPVEPLASTSFKNFKQERGENSGAYIIRIPFGPKDKYLAKEHLWPFIQEFVDGALSHIVKMSRAIGEEISCGHPAWPAVIHGHYASAGVAAALLSGALNVPMVFTGHFLGKDKLEELLKQGRQTREQINMTYKIMCRIEAEELALDASEIVIASTRQEIEEQWNLYDGFEVILARKLRARVKRGANCYGRYMPRMVIIPPGVEFGHMIHDFDMDGEEDGPSPASEDPSIWSEIMRFFTNPRKPMILAVARPYPEKNITTLVKAFGECRPLRELANLTLIMGNREAISKMHNMSAAVLTSVLTLIDEYDLYGQVAYPKRHKHSEVPDIYRLAVRTKGAFVNVPYFEQFGVTLIEAAMHGLPVIATKNGAPVEIHQVLDNGLLVDPHDQHAIADALYKLLSEKQLWSKCRENGLKNIHQFSWPEHCKNYLSRISTLGPRHPAFASNEDRIKAPIKGRKHVTVIAVDSVSKEDLIRIVRNSIEAARKENLSGSTGFVLSTSLTIGEIHSLLMSAGMLPTDFDAFICNSGSDLYYPSCTGDTPSNSRVTFALDRSYQSHIEYHWGGEGLRKYLVKWASSVVERRGRIEKQVIFEDPEHSSTYCLAFKVVNPNHLPPLKELQKLMRIQSLRCHALYNHGATRLSVIPIHASRSKALRYLSVRWGIELQNVVVLVGETGDSDYEELFGGLHKTVILKGEFNTSANRIHSVRRYPLQDVVALDSPNIIGIEGYGTDDMRSALKQLDIRAQ

SEQ ID NO: 8928 - protein, 809 aa, Zea mays
MSAPKLDRNPSIRDRVEDTLHAHRNELVALLSKYVNKGKGILQPHHILDALDEVQGSGGRALAEGPFLDVLRSAQEAIVLPPFVAIAVRPRPGVWEYVRVNVHELSVEQLTVSEYLRFKEELVDGQHNDPYVLELDFEPFNVSVPRPNRSSSIGNGVQFLNRHLSSIMFRNRDCLEPLLDFLRGHRHKGHVMMLNDRIQSLGRLQSVLTKAEEHLSKLPADTPYSQFAYKFQEWGLEKGWGDTAGHVLEMIHLLLDIIQAPDPSTLEKFLGRIPMIFNVVVVSPHGYFGQANVLGLPDTGGQIVYILDQVRALENEMVLRLKKQGLDVSPKILIVTRLIPDAKGTSCNQRLERISGTQHTYILRVPFRNENGILKKWISRFDVWPYLETFAEDAAGEIAAELQGTPDFIIGNYSDGNLVASLLSYKMGITQCNIAHALEKTKYPDSDIFWKNFDEKYHFSCQFTADIIAMNNADFIITSTYQEIAGSKNTVGQYESHTAFTLPGLYRVVHGIDVFDPKFNIVSPGADMSIYFPHTEKAKRLTSLHGSIENLIYDPEQNDEHIGHLDDRSKPILFSMARLDRVKNITGLVEAFAKCAKLRELVNLVVVAGYNDVNKSKDREEIAEIEKMHELIKTHNLFGQFRWISAQTNRARNGELYRYIADTHGAFVQPAFYEAFGLTVVEAMTCGLPTFATLHGGPAEIIEHGVSGFHIDPYHPEQAANLMADFFDRCKQDPDHWVNISGAGLQRIYEKYTWKIYSERLMTLAGVYGFWKYVSKLERLETRRYLEMFYILKFRELAKTVPLAIDQPQ

SEQ ID NO: 8929 - protein, 1081 aa, Craterostigma plantagineum
MAGNEWINGYLEAILDTGASAIDENSGGGKTAAAQKGRHHDHHFNPTKYFVEEVVSGVDESDLHRTWIKVVATRNTRERSSRLENMCWRIWHLTRKKKQLEWEDLQRLAARKWEREQGRKDVTEDMSEDLSEGEKGDVMGETPVALDSPRGNKKYHRNFSNLEVWSDSNKEKKLYIVLISLHGLVRGENMELGRDSDTGGQIKYVVEVARALAKMPGVYRVDLFTRQISSPEVDWSYAEPTEMLSSSSTTAGEAHEPEEEEEEEDLGEGSGAYIIRIPFGPRDKYLRKELLWPHIQEFVDGALSHIVNMSKALGDQIGGGQPVWPYVIHGHYADAGDSAALLSGALNVPMVLTGHSLGRNKLEQLLKQGRQTKEDINSMYRIMRRIEAEELSLDAAELVITSTKQEIEEQWGLYDGFDVKLERVLRARARRGVNCHGRFMPRMAVIPPGMDFSNVVVPEDGSEGDGDLATLTEATSPRSVPAIWADVMRFLTNPHKPMILALSRPDPKKNITTLVKAFGECRPLRELANLTLIMGNRDDIDEMSGGNASVLTTVLKLIDRYDLYGQVAFPKHHKQSDVPEIYRLASKTKGVFINPAFIEPFGLTLIEAAAHGLPMVATKNGGPVDIHRALNNGLLVDPHDQDAIANALLKLVSEKNLWNECRKNGLKNIHLFSWPEHCRTYLTRVAACRMRHPQWKTDTPLDETAIDDSLNDSLKDVLDMSLRLSVDGEKMSVNESSSVELPGGEAAELPDQVRRVLNKIKRQDSGPAQREAEGKAGDVPGKYPMLRRRRKLFVIALDCYDLKGNPDKKMILSIQEIVRAVRLDPQMSRFSGFALSTAMPVAELADFLKAGDVKVNDFDALICSSGSEVYYPGTYGEESGKLYLDPDYTSHIEYRWGGDGLKKTISKLMNTAEDGKSSVASSPIELVAKSSNSHCLSYAIKDPSKAKKVDDMRQKLRMRGLRCHLMYCRNSTSMQVVPLLASRSQALRYLFVRWRLSVANMYVILGETGDTDYEELISGTHKTLIMRGVVEKGSEELLRTAGSYLRDDVIPQDTPLIAYADKGAKAEHIVETFRQLSKAGM

SEQ ID NO: 8930 - protein, 806 aa, Cichorium intybus
MAEKVFTRVHSLRERLDSTLATHRNEILMVLSRIESHGKGILKPHQLMAEFDAISKEDNKLHDGAFHEVLKSTQEAIVLPPWVALAIRLRPGVWEYVRVNVNALVVEELSVPEYLHFKEELVSGDSNGNFVLELDFEPFTASFPRPTLTKSIGNGVEFLNRHLSAKMFHDKDSMHPLLDFLRTHACKGKTMMLNDRIQNLNSLQAVLRKASEYLSTLDAATPYSEFAHKFQEIGLERGWGDKAEGVMEMIHMLLDLLEAPDACTLEKFLGRIPMVFNVVILSPHGYFAQENVLGYPDTGGQVVYILDQVPALEREMLKRIKEQGLDIVPRILIVTRLLPDAVGTTCGQRLEKVFGAEHSHILRVPFRNEKGILRKWISRFEVWPYIETFTEDVAKEVTAELQGKPDLIIGNYSEGNLVASLLAHKLGVTQCTIAHALEKTKYPDSDIYWKNFDQKYHFSSQFTADLIAMNHTDFIITSTFQEIAGSKDTVGQYESHTAFTMPGLYRVVHGIDVFDPKFNIVSPGADMGIYFSYTEKENVVLTALHPEIDELLFSSVENEEHLCVLKDKKKPILFTMARLDNVKNLTGLVEWYAKNDKLRELVNLVVVGGDRRKESKDLEEQAQMKKMYDLIDEYKLNGQFRWISSQMNRIRNGELYRVIADTRGAFIQPAFYEAFGLTVVEAMTCGLPTFATLHGGPAEIIVHGKSGFHIDPYHGDQVTDLLVKFFEKTKVDPSHWEAISKGAEQRIQEKYTWQIYSDRLLTLAGVYGFWKHVSKLDRLEIRRYLEMFYALKYRKMAESVPLAVDE

SEQ ID NO: 8931 - protein, 805 aa, Solanum lycopersicum
MAERVLTRVHRLRERVDATLCAHRNEILLFLSRIESHGKGILKPHELLAEFDAIRQDDKDKLNEHAFEELLKSTQEAIVLPPWVALAIRLRPGVWEYVRVNVNALVVEELSVPEYLQFKEELVDGASNGNFVLELDFEPFTASFPKPTLTKSIGNGVEFLNRHLSAKMFHDKESMAPLLEFLRAHHYKGKTMMLNDRIHNSNTLQNVLRKAEEYLIMLPPETPFFEFEHKFQEIGLEKGWGDTAERVLEMVCMLLDLLEAPDSCTLEKFLGRIPMVFNVVILSPHGYFAQENVLGYPDTGGQVVYILDQVPALEREMLKRIKEQGLDIIPRILIVTRLLPDAVGTTCGQRLEKVYGTEHSHILRVPFGTEKGIVRKWISRFEVWPYMETFIEDVAKEISAELQAKPDLIIGNYSEGNLAASLLAHKLGVTQCTIAHALEKTKYPDSDIYWKKFDEKYHFSSQFTADLIAMNHTDFIITSTFQEIAGSKDTVGQYESHMAFTMPGLYRVVHGINVFDPKFNIVSPGADINLYFPYSESEKRLTAFHPEIDELLYSDVENDEHLCVLKDRTKPILFTMARLDRVKNLTGLVEWYAKNPRLRGLVNLVVVGGDRRKESKDLEEQAEMKKMYELIETHNLNGQFRWISSQMNRVRNGELYRYIADTKGAFVQPAFYEAFGLTVVEAMTCGLPTFATNHGGPAEIIVHGKSGFHIDPYHGEQAADLLADFFEKCKKEPSHWETISTGGLKRIQEKYTWQIYSERLLTLAAVYGFWKHVSKLDRLEIRRYLEMFYALKYRKMAEAVPLAAE

SEQ ID NO: 8932 - protein, 807 aa, Arabidopsis thaliana
MPTGRFETMREWVYDAISAQRNELLSLFSRYVAQGKGILQSHQLIDEFLKTVKVDGTLEDLNKSPFMKVLQSAEEAIVLPPFVALAIRPRPGVREYVRVNVYELSVDHLTVSEYLRFKEELVNGHANGDYLLELDFEPFNATLPRPTRSSSIGNGVQFLNRHLSSIMFRNKESMEPLLEFLRTHKHDGRPMMLNDRIQNIPILQGALARAEEFLSKLPLATPYSEFEFELQGMGFERGWGDTAQKVSEMVHLLLDILQAPDPSVLETFLGRIPMVFNVVILSPHGYFGQANVLGLPDTGGQVVYILDQVRALENEMLLRIQKQGLEVIPKILIVTRLLPEAKGTTCNQRLERVSGTEHAHILRIPFRTEKGILRKWISRFDVWPYLETFAEDASNEISAELQGVPNLIIGNYSDGNLVASLLASKLGVIQCNIAHALEKTKYPESDIYWRNHEDKYHFSSQFTADLIAMNNADFIITSTYQEIAGSKNNVGQYESHTAFTMPGLYRVVHGIDVFDPKFNIVSPGADMTIYFPYSDKERRLTALHESIEELLFSAEQNDEHVGLLSDQSKPIIFSMARLDRVKNLTGLVECYAKNSKLRELANLVIVGGYIDENQSRDREEMAEIQKMHSLIEQYDLHGEFRWIAAQMNRARNGELYRYIADTKGVFVQPAFYEAFGLTVVESMTCALPTFATCHGGPAEIIENGVSGFHIDPYHPDQVAATLVSFFETCNTNPNHWVKISEGGLKRIYERYTWKKYSERLLTLAGVYAFWKHVSKLERRETRRYLEMFYSLKFRDLANSIPLATDEN

SEQ ID NO: 8933 - protein, 808 aa, Arabidopsis thaliana
MANAERMITRVHSQRERLNETLVSERNEVLALLSRVEAKGKGILQQNQIIAEFEALPEQTRKKLEGGPFFDLLKSTQEAIVLPPWVALAVRPRPGVWEYLRVNLHALVVEELQPAEFLHFKEELVDGVKNGNFTLELDFEPFNASIPRPTLHKYIGNGVDFLNRHLSAKLFHDKESLLPLLKFLRLHSHQGKNLMLSEKIQNLNTLQHTLRKAEEYLAELKSETLYEEFEAKFEEIGLERGWGDNAERVLDMIRLLLDLLEAPDPCTLETFLGRVPMVFNVVILSPHGYFAQDNVLGYPDTGGQVVYILDQVRALEIEMLQRIKQQGLNIKPRILILTRLLPDAVGTTCGERLERVYDSEYCDILRVPFRTEKGIVRKWISRFEVWPYLETYTEDAAVELSKELNGKPDLIIGNYSDGNLVASLLAHKLGVTQCTIAHALEKTKYPDSDIYWKKLDDKYHFSCQFTADIFAMNHTDFIITSTFQEIAGSKETVGQYESHTAFTLPGLYRVVHGIDVFDPKFNIVSPGADMSIYFPYTEEKRRLTKFHSEIEELLYSDVENKEHLCVLKDKKKPILFTMARLDRVKNLSGLVEWYGKNTRLRELANLVVVGGDRRKESKDNEEKAEMKKMYDLIEEYKLNGQFRWISSQMDRVRNGELYRYICDTKGAFVQPALYEAFGLTVVEAMTCGLPTFATCKGGPAEIIVHGKSGFHIDPYHGDQAADTLADFFTKCKEDPSHWDEISKGGLQRIEEKYTWQIYSQRLLTLTGVYGFWKHVSNLDRLEARRYLEMFYALKYRPLAQAVPLAQDD

SEQ ID NO: 8934 - protein, 805 aa, Tulipa gesneriana
MTERRLTRIHSIKERLGDSLSHHPNELLALFSRFIKQGKGMLERHQLLTEYESVIPEADREKLKDGVFEDTLRASQEAIVIPPWVALAIRPRPGVWEYVRVNVNELAVEECSEYLKFKEDLVDRSSQSNFVLEMDFEPFNANVPRPSLSKSIGNGVQFLNRHLSSKLFHDKESLYPLLNFLREHNYKGTTLMLNDRLQSLSALQTALRKADRYLLSISKDTPYSEFNHSFQVLGLEKGWGDTASRVSENIHLLLDLLEAPDPSTLEKFLGTIPMVFNVVILSPHGYFAQANVLGYPDTGGQVVYILDQVRALETEMLLKIKQQGLDITPRILIVTRLLPDAVGTTCGQRLERVLGTEHTHILRVPFRTDKGILRKWISRFEVWPYLETYAEDVAHELAGEMQATPDLIIGNYSDGNLVASLLAHRLGITQCTIAHALEKTKYPNSDIYLKKFDDQYHFSCQFTADLIAMNQSDFIITSTFQEIAGSKDTVGQYESHTAFTLPGLYRVVHGIDVFDPKFNIVSPGADMSIYYPYFEQEKRLTALHAEIEELLYSSVENEEHKFVLKDRNKPIIFSMARLDRVKNMTGLVELYGKNDRLKELVNLVVVAGDHGKESKDLEEQAELKKMYKLIEEYKLQGHIRWISAQMNRVRNGELYRYIADTKGAFVQPAFYEAFGLTVVESMTCGLPTFATCHGGPAEIIVHGVSGFHIDPYHGDKASEQLVSFFEKCKEDPAHWEKISQGGLQRIYEKYTWKLYSERLMTLAGVYGFWKYVSNLDRRETRRYLEMFYALKYRNLAKSVPLAIDN

SEQ ID NO: 8935 - protein, 836 aa, Arabidopsis thaliana
MEMTSGSLGNGIPEAMGQNRGNIKRCLEKYIENGRRVMKLNELMDEMEIVINDVTQRRRVMEGDLGKILCFTQAVVIPPNVAFAVRGTPGNWQYVKVNSSNLSVEALSSTQYLKLKEFLFDENWANDENALEVDFGALDFTLPWLSLSSSIGNGLSFVSSKLGGRLNDNPQSLVDYLLSLEHQGEKLMMNETLNTARKLEMSLILADVFLSELPKDTPFQAFELRFKECGFEKGWGESAGRVKETMRILSEILQAPDPQNIDRFFARVPRIFNVVIFSVHGYFGQTDVLGLPDTGGQVVYILDQVKALEDELLQRINSQGLNFKPQILVVTRLIPDAKKTKCNQELEPIFGTKYSNILRIPFVTENGILRRWVSRFDIYPYLERFTKDATTKILDILEGKPDLIIGNYTDGNLVASLMANKLGITQATIAHALEKTKYEDSDIKWKEFDPKYHFSSQFTADLISMNSADFIIASTYQEIAGSKERAGQYESHMSFTVPGLYRVVSGINVFDPRFNIAAPGADDSIYFPFTAQDRRFTKFYTSIDELLYSQSENDEHIGYLVDKKKPIIFSMARLDVVKNLTGLTEWYAKNKRLRDLVNLVIVGGFFDASKSKDREEISEIKKMHSLIEKYQLKGQFRWITAQTDRTRNGELYRSIADTRGAFVQPAHYEAFGLTVIEAMSCGLVTFATNQGGPAEIIVDGVSGFHIDPSNGEESSDKIADFFEKSGMDPDYWNMFSNEGLQRINECYTWKIYANKVINMGSTYSYWRHLNKDQKLAKQRYIHSFYNLQYRNLVKTIPILSDIPEPPPLPPKPLVKPSASKGSKRTQPRLSFRLFGA

SEQ ID NO: 8936 - protein, 963 aa, Oryza sativa
MAGNDNWINSYLDAILDAGKAAIGGDRPSLLLRERGHFSPARYFVEEVITGYDETDLYKTWLRANAMRSPQERNTRLENMTWRIWNLARKKKEFEKEEACRLLKRQPEAEKLRTDTNADMSEDLFEGEKGEDAGDPSVAYGDSTTGSSPKTSSIDKLYIVLISLHGLVRGENMELGRDSDTGGQVKYVVELAKALSSSPGVYRVDLLTRQILAPNFDRSYGEPTEMLVSTSFKNSKQEKGENSGAYIIRIPFGPKDKYLAKEHLWPFIQEFVDGALGHIVRMSKTIGEEIGCGHPVWPAVIHGHYASAGIAAALLSGSLNIPMAFTGHFLGKDKLEGLLKQGRHSREQINMTYKIMCRIEAEELSLDASEIVIASTRQEIEEQWNLYDGFEVILARKLRARVKRGANCYGRYMPRMVIIPPGVEFGHIIHDFEMDGEEENPCPASEDPPIWSQIMRFFTNPRKPMILAVARPYPEKNITSLVKAFGECRPLRELANLTLIMGNREAISKMNNMSAAVLTSVLTLIDEYDLYGQVAYPKHHKHSEVPDIYRLAARTKGAFVNVAYFEQFGVTLIEAAMNGLPIIATKNGAPVEINQVLNNGLLVDPHDQNAIADALYKLLSDKQLWSRCRENGLKNIHQFSWPEHCKNYLSRILTLGPRSPAIGGKQEQKAPISGRKHIIVISVDSVNKEDLVRIIRNTIEVTRTEKMSGSTGFVLSTSLTISEIRSLLVSAGMLPTVFDAFICNSGSNIYYPLYSGDTPSSSQVTPAIDQNHQAHIEYRWGGEGLRKYLVKWATSVVERKGRIERQIIFEDPEHSSTYCLAFRVVNPNHLPPLKELRKLMRIQSLRCNALYNHSATRLSVVPIHASRSQALRYLCIRWGIELPNVAVLVGESGDSDYEELLGGLHRTVILKGEFNIPANRIHTVRRYPLQDVVALDSSNIIGIEGYSTDDMKSALQQIGVLTQ

SEQ ID NO: 8937 - protein, 1059 aa, Vicia faba
MAGNDWLNSYLEAILDVGPGLDDAKSSLLLRERGRFSPTRYFVEEVIGFDETDLYRSWVRASSSRSPQERNTRLENMCWRIWNLARQKKQLESEAVQRVNKRRLERERGRREATADMSEDLSEGERGDPVSDVSTHGGGDSVKSRLPRISSADAMETWVNSQKGKKLYIVLISIHGLIRGENMELGRDSDTGGQVKYVVELARALGSMPGVYRVDLLTRQVSSPDVDWSYGEPTEMLAPRNTDEFGDDMGESSGAYIIRIPFGPRNKYIPKEELWPYIPEFVDGAMGHIIQMSKALGEQIGSGHAVWPVAIHGHYADAGDSAALLSGALNVPMIFTGHSLGRDKLEQLLKQGRLSTDEINSTYKIMRRIEAEELALDGTEIVITSTRQEIEEQWRLYNGFDPVLERKIRARIRRNVSCYGRYMPRMSVIPPGMEFHHIAPLDGDIETEPEGILDHPAPQDPPIWSEIMRFFSNPRKPVILALARPDPKKNITTLVKAFGECRPLRELANLTLIMGNRDGIDEMSSTSSSVLLSVLKLIDKYDLYGQVAYPKHHKQSDVPDIYRLAAKTKGVFINPAFIEPFGLTLIEAAAYGLPMVATKNGGPVDIHRVLDNGLLIDPHDEKSIADALLKLVSNKQLWAKCRQNGLKNIHLFSWPEHCKTYLSKIATCKPRHPQWQRSEDGGESSESEESPGDSLRDIQDLSLNLKFSLDGERSGDSGNDNSLDPDGNATDRTTKLENAVLSWSKGISKDTRRGGATEKSGQNSNASKFPPLRSRNRLFVIAVDCDTTSGLLEMIKLIFEAAGEERAEGSVGFILSTSLTISEIQSFLISGGLSPNDFDAYICNSGSDLYYPSLNSEDRLFVGDLYFHSHIEYRWGGEGLRKTLIRWASSITDKKSENNEQIVSPAEQLSTDYCYAFNVRKAGMAPPLKELRKLMRIQALRCHPIYCQNGTRLNVIPVLASRSQALRYLYVRWGFELSKMVVFVGECGDTDYEGLVGGLHKSVILKGVGSRAISQLHNNRNYPLSDVMPLDSPNIVQATEGSSSADIQALLEKVGYHKG

SEQ ID NO: 8938 - protein, 942 aa, Arabidopsis thaliana
MSSSSQAMLQKSDSIAEKMPDALKQSRYHMKRCFASFVGGGKKLMKREHLMNEIEKCIEDSRERSKILEGLFGYILTCTQEAAVVPPFVALAARPNPGFWEYVKVNSGDLTVDEITATDYLKLKESVFDESWSKDENALEIDFGAIDFTSPRLSLSSSIGKGADYISKFISSKLGGKSDKLEPLLNYLLRLNHHGENLMINDDLNTVAKLQKSLMLAVIVVSTYSKHTPYETFAQRLKEMGFEKGWGDTAERVKETMIILSEVLEAPDNGKLDLLFSRLPTVFNVVIFSVHGYFGQQDVLGLPDTGGQVVYILDQVRALEEELLIRINQQGLGFKPQILVVTRLIPEARGTKCDQELEAIEGTKHSHILRVPFVTNKGVLRQWVSRFDIYPYLERFTQDATSKILQRLDCKPDLIIGNYTDGNLVASLMATKLGVTQGTIAHALEKTKYEDSDAKWKELDPKYHFSCQFTADLIAMNVTDFIITSTYQEIAGSKDRPGQYESHTAFTMPGLCRVVSGIDVFDPKFNIAAPGADQSVYFPYTEKDKRFTKFHPSIQELLYNEKDNAEHMGYLADREKPIIFSMARLDTVKNITGLVEWYGKDKRLREMANLVVVAGFFDMSKSNDREEKAEIKKMHDLIEKYKLKGKFRWIAAQTDRYRNSELYRCIADTKGVFVQPALYEAFGLTVIEAMNCGLPTFATNQGGPAEIIVDGVSGFHIDPNNGDESVTKIGDFFSKCRSDGLYWDNISKGGLKRIYECYTWKIYAEKLLKMGSLYGFWRQVNEDQKKAKKRYIEMLYNLQFKQLTKKVTIPEDKPLPLRLASLRNLLPKKTTNLGAGSKQKEVTETEKTKQKSKDGQEQHDVKVGEREVREGLLAADASERVKKVLESSEEKQKLEKMKIAYGQQHSQGASPVRNLFWSVVVCLYICYILKQRFFGANSAQEY

SEQ ID NO: 8939 - protein, 766 aa, Beta vulgaris
AGGKQILSDGPFSEVLRSAQEAIVVPPFVAIAVRPRPGVWEYVRVNVSELNVEQLTVSEYLHFKEELVDGKADDHYVLELDFEPFNESVPRPTRSSSIGNGVQFLNRHLSSSMFCNKDCLEPLLDFLRVHKHKGVVMMLNDRIQTIQRLQSALSKAEDYLIKLPADTPYSEFEFVIQGMGFERGWGDTAERVLEMMHLLLDILQAPDPSTLETFLGRLPMVFNVVILSVHGYFGQAHVLGLPDTGGQIVYILDQVRSLEHEMLQRIKKQGLDVTPRILIVSRLIPDAKGTTCNQRMEKVSGTEHASILRVPFRSEKGILRKWISRFDVWPYLETFTEDAAGEIIGELQGRPDLIIGNYSDGNIVASLLSHKMGVTQCNIAHALEKTKYPDSDIYWKRFEDKYHFSCQFSADLMAMNHADFIITSTYQEIAGTKNTVGQYESHKAFTFPGLYRVVHGIDVFDPKFNIVSPGADMAIYFPFSEKDVTCLTSLHRLIEQLLFKPEQNEEHIGVLDDTSKPIIFSMARLDRVKNITGLVECYGKNAKLRELANLVVVAGYNDVKKSNDREEIAEIEKMHRLIQEYNLRGQFRWIASQTNRVRNGELYRYICDKGGIFAQPAFYEAFGLTVVEAMTCGLPTFATCHGGPAEIIEDGVSGFHIDPYHADQAEKMTEFFVKCREDPNYWTKISAGGLLRIKERYTWQKYSERLMTLAGVYGFWKYVSKLERRETRRYLEMFYILKFRDLANSVPLATDEEPSTTDAVATFRGP

SEQ ID NO: 8940 - protein, 806 aa, Nostoc flagelliforme
MSELLQAVLDSEEKSDLRSFLSELRQQEKKYLLRNDILNVYSEYCSKSQKPEEFYTSSELGKLIYYTQEIIQEESSFCFIIRSKIASQEVYWLTSDLSIEPMMVQDLLDLRDRLVNKYHPNEGDLLELDFGPFYDYTPVIRDPKNIGKGVQFLNRYLSSKIFQDSKQLLDSLFNFLRLHHYNGVQLLINDRIQSQQQLSEQVKKAIGFVNNRPDDEPYEQFRFQLQSMGFEPGWGNTAARVRETLNILDELIDSADPQTLEAFISRVPMIFRIVLVSAHGWFGQEGVLGRPDTGGQVVYVLDQAKSLEKQLQEDALLAGLEKLNVEPKVIILTRLIPNSDGTLCNQRLEKVHGTENAWILRVPLREFNPNMTQNWISRFEFWPYLETFAIDSERELRAEFHGTPDLIVGNYTDGNLVAFLLARRLKVTQCNVAHALEKSKYLFSNLYWQELEEKYHFSLQFTADLIAMNAANFVVSSTYQEIVGTPDSVGQYESYKCFTMPELYHVTNGIELFSPKFNVVPPGVNENNYFPYTRTKDRVESDRQRLAETLFTLEDPTQIFGKLDDPNKRPLFSMARLDHIKNLTGLAECYGQSKELQEHCNLILVAGKLRVEESGDNEERDEIIKLYQIIEEYNLHGKIRWLGVRLTKTDSGEIYRVIANHQGIFVQPALFEAFGLTILESMVSGLPTFATQFGGPLEIIQDKVNGFLINPTNLDETATKIVEFITKCEQNPNYWNEISERGIDRVYSTYTWKIHTTKLLSLARIYGFWNFTSKENREDLLRYLEALFYLIYKPRAQQLLEQHKYR

SEQ ID NO: 8941 - protein, 809 aa, Pisum sativum
MSTHPKFTRVPSIRDRVQDTLSAHRNELISLLSRYVAQGKGILQPHNLIDELDNILGEDHATLDLKNGPFGQIINSAQEAIVLPPFVAIAVRPRPGVWEYVRVNVFELSVEQLSVSEYLSFKEELVEGKSNDNIILELDLEPFNASFPRPTRSSSIGNGVQFLNRHLSSNMFRNKDCLEPLLDFLRVHTYKGHALMLNDRIQSISKLQSALVKAEDHLSKLAPDTLYSEFEYELQGTGFERGWGDTAARVLEMMHLLLDILQAPDPSTLETFLGRVPMVFNVVILSPHGFFGQANVLGLPDTGGQVVYILDQVRALESEMLVRIKKQGLDFTPRILIVTRLIPDAKGTTCNQRLERVSGTEYTHILRVPFRSEKGILRKWISRFDVWPFLETFAEDVASEIAAELQCYPDFIIGNYSDGNLVASLLAYKMGVTQCTIAHALEKTKYPDSDIYWKKFEDKYHFSCQFTADLIAMNNADFIITSTYQEIAGTKNTIGQYESHTAFTLPGLYRVVHGIDVFDPKFNIVSPGADMTIYFPYSDKEKRLTALHSSIEKLLYGTEQTDEYIGSLTDRSKPIIFSMARLDRVKNITGLVESYAKNSKLRELVNLVVVAGYIDVKKSSDREEIEEIEKMHDLMKQYNLNGEFRWITAQTNRARNGELYRYIADTKGAFVQPAFYEAFGLTVVEAMTCGLPTFATNHGGPAEIIEHGVSGFHIDPYHPDQASELLVDFFQRCKEDPNHWNKVSDGGLQRIYERYTWKIYSERLMTLAGVYSFWKYVSKLERRETRRYLEMFYILKFRDLANSVPIAKG

SEQ ID NO: 8942 - protein, 803 aa, Alnus glutinosa
MAERVLTRVHSLRERLDETLVANRNEIVALLSRIIGKGKGICRNHQLIAEVEAIPEATRKKLLDGAFGEVLRSAQEAIVLPPWVALAVRPRPGVWEYIRVNVHALVVEELRVPEYLHFKEELVDGSTNGNFVLELDFDPFNASFPRPTLSKSIGNGVEFLNRHLSAKLFHDKESMHPLLEFLRVHCYKGKNMMLNDRIQNVNALQYVLRKAEEYLTTIAPETPYVKFEHKFQEIGLVRGWGDTAEGVLEMIQLLLVLLEAPVPCTLEKFLGKSLWLNVVIMSPHGYFAQDNVGYPDTGGQVVYILDQVRALESEMLLRIKQQGLDITPRILIVTRLLPDAVGTTCGQRLERVYGSEHADILRVPFRTEKGIVRQWISRFEVWPYLETYTEDVGVELIKELQGKPDLIIGNYSDGNIVASLLAHKFGVTQCTHAHALEKTKYPESDIYWKKMDEKYHFSSQFTADLIAMNHTDFIITSTFQEIAGSKDTVGQYESHTAFTLPGLYRVVHELCIDPKFNIVSPGADMSIYFPYTEKEKRLTSFHPEIEELLYSPVENEEHLCVLKDRNKPIIFTMARLDRVKNITGLVEWYGKNTRLRELVNLVVVAGNLEKESKDNEEKAEMTKMHGLIETYKLNGQFRWISSQMNRVRNGELYRYIADTKGGLCAGPAIYEAFGLTVVESMTCGLPTFATCKGGPAEIIVHGKSGFHIDPYHGEQAAQLLVDFFEKTKADPSHWAKISLGGLQRIHEKYTWKIYSERLLTLTGVTAFWKHVSNLDRLESRRYIEMFYALKYRKLAESVPLAVE

SEQ ID NO: 8943 - protein, 801 aa, Daucus carota
MAQPLLSLRQRFESTFSSHRQEIFMFLSRIQSLGNGILKPHQLFSEFQAISKIDRLKLEDSALVQLLNSAQEAIVCSPWIALAIRLRPGVWEYVRLNVHQLVVEELTVPDYLYLKEELVNASSNGNFVLELDFAPFTASIPRPTLTKSIGNGVEFLNRHLSAKMFQDKDSMHPLLDFLRLHHHNGRTLMLNNRVQTVNGLQDILRIAGEYLSKLPSDTPYSDFEHKFQEIGFERGWGDTAEHVSEMFHMLLDLLEAPDACTLETFLGKIPMIFNVVILSPHGYFAQENVLGYPDTGGQVVYILDQVPAMEREMTKRIKEQGLDIIPRILIVTRLLPDAVGTTCNLRLEKVFGAEHSHILRVPFRTEKGILRKWISRFEVWPYMETFTEDVAKEIALELKAKPDLIIGNYSEGNLVASLLANKLGVTQCTIAHALEKTKYPDSDIYWEKFDKKYHFSSQFTADLIAMNHTDFIITSTFQEIAGSKDTVGQYESHTAFTMPGLYRVVHGIDVFDPKFNIVSPGADTSVYYPYTEKKRRLTALHPEIEDLLFSSVENKEHICVLKDRYKPILFTMARLDNVKNLTGIVEWYAKNPKLRELVNLVVVGGDRRKESKDLEEQAQMKKMYGLIDTYKLNGQFRWISAQKNRVRNGELYRCIADTKGAFVQPAFYEAFGLTVIEAMTCGLPTFATIHGGPAEIIVHGTSGFHIDPYHGEKAAELIVNFFERCKTEPSHWETISAGGLKRIQEKYTWQIYSERLLTLGGVYGFWKHVSKLDRIEIRRYLEMFCALKYRNLAESVPLAVD

SEQ ID NO: 8944 - protein, 808 aa, Daucus carota
MGEPVLTRVHSLRERMDSTLANHRNEILMFLSRIESHGKGILKPHQLLAEYEAISKEDKLKLDDGHGAFAEVIKSTQEAIVSPPWVALAIRLRPGVWEYVRVNVHHLVVEELSVPQYLQFKEELVIGSSDANFVLELDFAPFTASFPRPTLTKSIGNGVEFLNRHLSAKMFHGKDSMHPLLEFLRLHNYNGKTLMLNNRVQNVNGLQSMLRKAGDYLSTLPSDTPYSEFEHKFQEIGFERGWGDTAERVTEMFHMLLDLLEAPDASTLETFLGKIPMVFNVVILSPHGYFAQENVLGYPDTGGQVVYILDQVPALEREMIKRIKEQGLDIKPRILIVTRLLPDAVGTTCNQRLEKVFGAEHAHILRVPFRTEKGILRKWISRFEVWPYIETFTEDVAKEIALELQAKPDLIIGNYSEGNLVASLLAHKLGVTQCTIAHALEKTKYPDSDIYWEKFDKKYHFSSQFTADLIAMNHTDFIITSTFQEIAGSKDTVGQYESHTAFTMPGLYRVVHGIDVFDPKFNIVSPGADTSVYFSYKEKEKRLTTLHPEIEELLYSSVENEEHLCIIKDKNKPILFTMARLDNVKNLTGFVEWYAKSPKLRELVNLVVVGGDRRKESKDLEEQAQMKKMYELIDTYKLNGQFRWISSQMNRVRNGELYRYIADTKGAFVQPAFYEAFGLTVVEAMTCGLPTFATLHGGPAEIIVHGKSGFHIDPYHGEQVAELLVNFFEKCKTDPSQWDAISAGGLKRIQEKYTWQIYSERLLTLAGVYGFWKHVSKLDRLEIRRYLEMFYALKYRKLAESVPLAKDE

SEQ ID NO: 8945 - protein, 802 aa, Zea mays
MAAKLTRLHSLRERLGATFSSHPNELIALFSRYVHQGKGMLQRHQLLAEFDALFDSDKEKYAPFEDILRAAQEAIVLPPWVALAIRPRPGVWDYIRVNVSELAVEELSVSEYLAFKEQLVDGQSNSNFVLELDFEPFNASFPRPSMSKSIGNGVQFLNRHLSSKLFQDKESLYPLLNFLKAHNYKGTTMMLNDRIQSLRGLQSSLRKAEEYLLSVPQDTPYSEFNHRFQELGLEKGWGDTAKRVLDTLHLLLDLLEAPDPANLEKFLGTIPMMFNVVILSPHGYFAQSNVLGYPDTGGQVVYILDQVRALENEMLLRIKQQGLDITPKILIVTRLLPDAAGTTCGQRLEKVIGTEHTDIIRVPFRNENGILRKWISRFDVWPYLETYTEDVSSEIMKEMQAKPDLIIGNYSDGNLVATLLAHKLGVTQCTIAHALEKTKYPNSDIYLDKFDSQYHFSCQFTADLIAMNHTDFIITSTFQEIAGSKDTVGQYESHIAFTLPGLYRVVHGIDVFDPKFNIVSPGADMSVYYPYTETDKRLTAFHPEIEELIYSDVENSEHKFVLKDKKKPIIFSMARLDRVKNMTGLVEMYGKNARLRELANLVIVAGDHGKESKDREEQAEFKKMYSLIDEYKLKGHIRWISAQMNRVRNGELYRYICDTKGAFVQPAFYEAFGLTVIESMTCGLPTIATCHGGPAEIIVDGVSGLHIDPYHSDKAADILVNFFDKCKADPSYWDEISQGGLQRIYEKYTWKLYSERLMTLTGVYGFWKYVSNLERRETRRYIEMFYALKYRSLASQVPLSFD

SEQ ID NO: 8946 - protein, 1045 aa, Beta vulgaris
MAGNDWINSYLEAILDVGPGLDDAKSSLLLRERGRFSPTRYFVEEVITGFDETDLHRSWVRAQATRSPQERNTRLENMCWRIWNLARQKKQLENEEAQRKTKRRMELERGRREATADMSEDLSEGEKDISAHGDSTRPRLPRINSLDAMETWISQQKEKKLYLVLISLHGLIRGENMELGRDSDTGGQVKYVVELARALGSMPGVYRVDLLTRQVSSPDVDWSYGEPTEMLNPRDSNGFDDDDDEMGESSGAYIVRIPFGPRDKYIAKEELWPYIPEFVDGALNHIVQMSKVLGEQIGSGETVWPVAIHGHYADAGDSAALLSGGLNVPMLLTGHSLGRDKLEQLLKQGRMSKDDINNTYKIMRRIEAEELSLDASEIVITSTRQEIEEQWHLYDGFDPVLERKLRARMKRGVSCYGRFMPRMVVIPPGMEFNHIVPHEGDMDGETEETEEHPTSPDPPIWAEIMRFFSKPRKPMILALARPDPKKNITTLVKAFGECRPLRELANLTLIMGNRDGIDEMSSTSSSVLLSVLKLIDQYDLYGQVAYPKHHKQADVPEIYRLAAKTKGVFINPAFIEPFGLTLIEAAAHGLPMVATKNGGPVDIQRVLDNGLLVDPHEQQSIATALLKLVADKQLWTKCQQNGLKNIHLYSWPEHSKTYLSRIASSRQRQPQWQRSSDEGLDNQEPESPSDSLRDIKDISLNLEVLVRPEKRVKTLKILGLMTKANSRMLLCSWSNGVHKMLRKARFSDKVDQASSKYPAFRRRKLIYVIAVDGDYEDGLFDIVRRIFDAAGKEKIEGSIGFILSTSYSMPEIQNYLLSKGFNLHDFDAYICNSGSELYYSSLNSEESNIIADSDYHSHIEYRWGGEGLRRTLLRWAASITEKNGENEEQVITEDEEVSTGYCFAFKIKNQNKVPPTKELRKSMRIQALRCHVIYCQNGSKMNVIPVLASRSQALRYLYVRWGVELSKMVVFVGECGDTDYEGLLGGVHKTVILKGVSNTALRSLHANRSYPLSHVVSLDSPNIGEVSKGCSSSEIQSIVTKLSKA

SEQ ID NO: 8947 - protein, 1047 aa, Arabidopsis thaliana
MVGNDWVNSYLEAILAAEPGIANSKPPGTGDSKSSLLLRERGHFSPTRYFVEEVITGFDETDLHRSWVQAAATRSPQERNTRLENLCWRIWNLARQKKQVEGKNAKREAKREREREKARREVTAEMSEDFSEGEKADLPGEIPTPSDNNTKGRMSRISSVDVFENWFAQHKEKKLYIVLISLHGLIRGENMELGRDSDTGGQVKYVVELARALGSMPGVYRVDLLTRQVTAPDVDSSYSEPSEMLNPIDTDIEQENGESSGAYIIRIPFGPKDKYVPKELLWPHIPEFVDRALSHIMQISKVLGEQIGGGQQVWPVSIHGHYADAGDSTALLSGALNVPMVFTGHSLGRDKLEQLLKQGRPKEEINSNYKIWRRIEAEELCLDASEIVITSTRQEVDEQWRLYDGFDPVLERKLRARMKRGVSCLGRFMPRMVVIPPGMEFHHIVPHDVDADGDDENPQTADPPIWSEIMRFFSNPRKPMILALARPDPKKNLVTLVKAFGECRPLRELANLTLIMGNRNDIDELSSTNSSVLLSILKLIDKYDLYGQVAMPKHHQQSDVPEIYRLAAKTKGVFINPAFIEPFGLTLIEAGAHGLPTVATINGGPVDIHRVLDNGLLVDPHDQQAIADALLKLVSDRQLWGRCRQNGLNNIHLFSWPEHCKTYLARIASCKQRHPKWQRVEFENSDSDSPSDSLRDINDISLNLKLSLDGEKSGSNNGVDTNLDAEDRAAERKAEVEKAVSTLAQKSKPTEKFDSKMPTLKRRKNIFVISVDCSATSDLLAVVKTVIDAAGRGSSTGFILSTSMTISETHTALLSGGLKPQDFDAVICSSGSELYFTSSGSEDKTALPYTLDADYHSHIEFRWGGESLRKTLIRWISSVEEKKKTKKGEILVEDESSSTNYCLSFKVKDPALMPPMKELRKLMRNQALRCNAVYCQNGARLNVIPVLASRSQALRYLLVRWGIDLSNMVVFVGDSGDTDYEGLLGGIHKTVILKGLASDLREQPGNRSYPMEDVTPLNSPNITEAKECGRDAIKVALEKLGISLLKP

SEQ ID NO: 8948 - protein, 809 aa, Arabidopsis thaliana
MANPKLTRVLSTRDRVQDTLSAHRNELVALLSRYVDQGKGILQPHNLIDELESVIGDDETKKSLSDGPFGEILKSAMEAIVVPPFVALAVRPRPGVWEYVRVNVFELSVEQLTVSEYLRFKEELVDGPNSDPFCLELDFEPFNANVPRPSRSSSIGNGVQFLNRHLSSVMFRNKDCLEPLLDFLRVHKYKGHPLMLNDRIQSISRLQIQLSKAEDHISKLSQETPFSEFEYALQGMGFEKGWGDTAGRVLEMMHLLSDILQAPDPSSLEKFLGMVPMVFNVVILSPHGYFGQANVLGLPDTGGQVVYILDQVRALETEMLLRIKRQGLDISPSILIVTRLIPDAKGTTCNQRLERVSGTEHTHILRVPFRSEKGILRKWISRFDVWPYLENYAQDAASEIVGELQGVPDFIIGNYSDGNLVASLMAHRMGVTQCTIAHALEKTKYPDSDIYWKDFDNKYHFSCQFTADLIAMNNADFIITSTYQEIAGTKNTVGQYESHGAFTLPGLYRVVHGIDVFDPKFNIVSPGADMTIYFPYSEETRRLTALHGSIEEMLYSPDQTDEHVGTLSDRSKPILFSMARLDKVKNISGLVEMYSKNTKLRELVNLVVIAGNIDVNKSKDREEIVEIEKMHNLMKNYKLDGQFRWITAQTNRARNGELYRYIADTRGAFAQPAFYEAFGLTVVEAMTCGLPTFATCHGGPAEIIEHGLSGFHIDPYHPEQAGNIMADFFERCKEDPNHWKKVSDAGLQRIYERYTWKIYSERLMTLAGVYGFWKYVSKLERRETRRYLEMFYILKFRDLVKTVPSTADD

SEQ ID NO: 8949 - protein, 846 aa, Oryza sativa
MAVGLRRSDSIADMMPEALRQSRYQMKRCFQRYVSQGKRLMKRQQLLDELDKSVDDKADKDQLLQGFLGYVISSTQEAAVLPPFVAFAVRMNPGIWEFVKVHSANLSVEQMTPSDYLKNKEALVDDKWGAYDDDSQLEVDFGALDLSTPHLTLPSSIGKGAHLVSRFMSSKLTDNKKPLLDYLLALSHRGDKLMINDILDTVDKLQTALLLAEVYVAGLHPDTNYSEFEQKFQEWGLEKGWGDTAETCKETLSSLSEVLQAPDPINMEKFFSTVPCVFTVVIFSIHGYFGQEKVLGMPDTGGQVVYILDQVRALEDELLQRIKQQGLNATPKILVLTRLIPEAKGTKCNVELEPIENTKHSNILRVPFKTEDGKVLPQWVSRFDIYPYLERYAQDSSVKILEILEGKPDLVIGNYTDGNLVASLLTSKLGVTQGTIAHALEKTKYEDSDIKWRELDHKYHFSCQFTADMIAMNTSDFIIASTYQEIAGSKEKPGQYESHYAFTMPGLCRYATGINVFDPKFNIAAPGADQSVYFPFTQKQKRLTDLHPQIEELLYSKEDNNEHIGHLADRSKPIIFSMARLDKIKNITGLVEWYGQNKRLRDLVNLVIVGGLLDPSQSKDREEIEEINKMHSLINKYQLVGQIRWIKGQTDRVRNGELYRCIADTKGAFVQPALYEAFGLTVIEAMNCGLPTFATNQGGPAEIIVDEVSGFHINPLNGKEASDKIADFFQKCKEDLIYWSKMSTAGLQRIYECYTWQIYATKVLNMASIYGFWRTLDKEERQAKQHYLHMFYNLQFRKLAKNVPTLGEQPAQPTESAEPNRIIPRPKERQVCPFLRNLLKKETGNN

SEQ ID NO: 8950 - protein, 820 aa, Tulipa gesneriana
MADRAMTRVHSVRERLTDTLSAHKNELLALFSRFVKQGQGMLQPHQLLTEYEAVIPAADREKLKDGVFEDVLKAAQEAIVIPPWVALAIRPRPGVWEYVRVNVSELAVEELTVPEYLQFKEELVDGSGQSNFTLELDFEPFNASFPRPSLSKSIGNGVQFLNRHLSSKLFHDKESMYPLLNFLKEHHYNGTSMMLNDRIQTLGALQASLRRADEYVLSLPLDTPYSDFGHRFQELGLEKGWGDNAKRVHENLHLLLDLLEAPDPCTLENFLGTIPMVFNVVILSPHGYFAQANVLGYPDTGGQVVYILDQVRAMESEMLLRIKQQGLDITPRILIVTRLLPDAVGTTCGQRLEKVLGTEHTHILRVPFRTEHGILRKWISRFEVWPYLETYAEDVANEVAGELQATPDLIIGNYSDGNLVASLMAHKLGVTQCTIAHALEKTKYPNSDLYWKKFEKQYHFSCQFTADLIAMNHADFIITSTFQEIAGSKDTVGQYESHTGFTLPGLYRVVHGIDVFDPKFNIVSPGADMSIYFPYTEAEKRLTALHPEIEELLYSSAESTEYKFGLKDKTKPIIFSMARLDRVKNMTGLVELYAKNDRLKELVNLVVVCGDHAKASKDLEEQAELKKMYSLIEEYKLDGHIRWISAQMNRVRNGELYRYIADSKGVFVQPAFYEAFGLTVVESMTCGLPTFATCHGGPAEIIVHGVSGYHIDPYHGDKAAELLVDFFEKSKKDQTHWDAISNGGLKRIYEKYTWKIYSERLLTLAGVYGFWKYVSNLDRRETKRYLEMFYALKYRNLAKSVPLAVDGEAAVNGKICTLGC

SEQ ID NO: 8951 - protein, 1062 aa, Arabidopsis thaliana
MAGNEWINGYLEAILDSQAQGIEETQQKPQASVNLREGDGQYFNPTKYFVEEVVTGVDETDLHRTWLKVVATRNSRERNSRLENMCWRIWHLTRKKKQLEWEDSQRIANRRLEREQGRRDATEDLSEDLSEGEKGDGLGEIVQPETPRRQLQRNLSNLEIWSDDKKENRLYVVLISLHGLVRGENMELGSDSDTGGQVKYVVELARALARMPGVYRVDLFTRQICSSEVDWSYAEPTEMLTTAEDCDGDETGESSGAYIIRIPFGPRDKYLNKEILWPFVQEFVDGALAHILNMSKVLGEQIGKGKPVWPYVIHGHYADAGDSAALLSGALNVPMVLTGHSLGRNKLEQLLKQGRQSKEDINSTYKIKRRIEAEELSLDAAELVITSTRQEIDEQWGLYDGFDVKLEKVLRARARRGVNCHGRFMPRMAVIPPGMDFTNVEVQEDTPEGDGDLASLVGGTEGSSPKAVPTIWSEVMRFFTNPHKPMILALSRPDPKKNITTLLKAFGECRPLRELANLTLIMGNRDDIDELSSGNASVLTTVLKLIDKYDLYGSVAYPKHHKQSDVPDIYRLAANTKGVFINPALVEPFGLTLIEAAAHGLPMVATKNGGPVDIHRALHNGLLVDPHDQEAIANALLKLVSEKNLWHECRINGWKNIHLFSWPEHCRTYLTRIAACRMRHPQWQTDADEVAAQDDEFSLNDSLKDVQDMSLRLSMDGDKPSLNGSLEPNSADPVKQIMSRMRTPEIKSKPELQGKKQSDNLGSKYPVLRRRERLVVLAVDCYDNEGAPDEKAMVPMIQNIIKAVRSDPQMAKNSGFAISTSMPLDELTRFLKSAKIQVSEFDTLICSSGSEVYYPGGEEGKLLPDPDYSSHIDYRWGMEGLKNTVWKLMNTTAVGGEARNKGSPSLIQEDQASSNSHCVAYMIKDRSKVMRVDDLRQKLRLRGLRCHPMYCRNSTRMQIVPLLASRSQALRYLFVRWRLNVANMYVVVGDRGDTDYEELISGTHKTVIVKGLVTLGSDALLRSTDLRDDIVPSESPFIGFLKVDSPVKEITDIFKQLSKATA

SEQ ID NO: 8952 - protein, 1050 aa, Arabidopsis thaliana
MARNDWINSYLEAILDVGTSKKKRFESNSKIVQKLGDINSKDHQEKVFGDMNGKDHQEKVFSPIKYFVEEVVNSFDESDLYKTWIKVIATRNTRERSNRLENICWRIWHLARKKKQIVWDDGVRLSKRRIEREQGRNDAEEDLLSELSEGEKDKNDGEKEKSEVVTTLEPPRDHMPRIRSEMQIWSEDDKSSRNLYIVLISMHGLVRGENMELGRDSDTGGQVKYVVELARALANTEGVHRVDLLTRQISSPEVDYSYGEPVEMLSCPPEGSDSCGSYIIRIPCGSRDKYIPKESLWPHIPEFVDGALNHIVSIARSLGEQVNGGKPIWPYVIHGHYADAGEVAAHLAGALNVPMVLTGHSLGRNKFEQLLQQGRITREDIDRTYKIMRRIEAEEQSLDAAEMVVTSTRQEIDAQWGLYDGFDIKLERKLRVRRRRGVSCLGRYMPRMVVIPPGMDFSYVLTQDSQEPDGDLKSLIGPDRNQIKKPVPPIWSEIMRFFSNPHKPTILALSRPDHKKNVTTLVKAFGECQPLRELANLVLILGNRDDIEEMPNSSSVVLMNVLKLIDQYDLYGQVAYPKHHKQSEVPDIYRLAAKTKGVFINPALVEPFGLTLIEAAAYGLPIVATRNGGPVDIVKALNNGLLVDPHDQQAISDALLKLVANKHLWAECRKNGLKNIHRFSWPEHCRNYLSHVEHCRNRHPTSSLDIMKVPEELTSDSLRDVDDISLRFSTEGDFTLNGELDAGTRQKKLVDAISQMNSMKGCSAAIYSPGRRQMLFVVAVDSYDDNGNIKANLNEIIKNMIKAADLTSGKGKIGFVLASGSSLQEVVDITQKNLINLEDFDAIVCNSGSEIYYPWRDMMVDADYETHVEYKWPGESIRSVILRLICTEPAAEDDITEYASSCSTRCYAISVKQGVKTRRVDDLRQRLRMRGLRCNIVYTHAATRLNVIPLCASRIQALRYLSIRWGIDMSKTVFFLGEKGDTDYEDLLGGLHKTIILKGVVGSDSEKLLRSEENFKREDAVPQESPNISYVKENGGSQEIMSTLEAYGIK

SEQ ID NO: 8953 - protein, 416 aa, Unknown
  Description of Unknown: Nicotiana langsdorffii x Nicotiana sanderae sequence
YFAQENVLGYPYTGGQVVYILHQVPALEREMLKRLKVQGLDITPRILIVTRLLPDAVGTTCGQRLEKVYGSEHSHILRVPFRTEKGIVRKWVSRFEVWPYMETFTEDVAKELAAELQAKPDLIIGNYSEGNLVASLLAHKLGVTQCTIAHALEKTKYPDSDIYWKKFDEKYHFSSQFTADLIAMNHTDFIITSTFQEIAGSKDTVGQYESHQAFTMPGLYRVVHGIDVFDPKFNVVSPGADINLYFPYSEKEKRLTALHPEIEELLYSDVENEEHLCVLKARNKPILFTMARLDRVKNLTGLVEWYAKNARLRELVNLVVVGDDRRKESKDLEEHAEMKKMYELIKTHNLNGQFRWISSQMNRVRNGELYRYIADTRGAFVQPAFYEAFGLTVVEAMTCGLPTFATNHGGPAEIIV

SEQ ID NO: 8954 - protein, 1014 aa, Oryza sativa
MVHHYSMSCPDLEAIEQVEWEFSRQLSRRRLEQELGSREAAADLSELSEGEKDGKPDTHPPPAAAAAEAAADDGGGGDHQQQQQQPPPHQLSRFARINSDPRIVSDEEEEVTTDRNLYIVLISIHGLVRGENMELGRDSDTGGQVKYVVELARALAATPGVHRVDLLTRQISCPDVDWTYGEPVEMLTVPAADADDEDGGGGSSGGAYIVRLPCGPRDKYLPKESLWPHIPEFVDRALAHVTNVARALGEQLSPPPPSDGAGAAAQAVWPYVIHGHYADAAEVAALLASALNVPMVMTGHSLGRNKLEQLLKLGRMPRAEIQGTYKIARRIEAEETGLDAADMVVTSTKQEIEEQWGLYDGFDLKVERKLRVRRRRGVSCLGRYMPRMVVIPPGMDFSYVDTQDLAADGAGGAGDAADLQLLINPNKAKKPLPPIWSEVLRFFTNPHKPMILALSRPDPKKNVTTLLKAYGESRHLRELANLTLILGNRDDIEEMSGGAATVLTAVLKLIDRYDLYGQVAYPKHHKQTDVPHIYRLAAKTKGVFINPALVEPFGLTIIEAAAYGLPVVATKNGGPVDILKVLSNGLLVDPHDAAAITAALLSLLADKSRWSECRRSGLRNIHRFSWPHHCRLYLSHVAASCDHPAPHQLLRVPPSPSSSSAAAAAAGGGGAAASSEPLSDSLRDLSLRISVDAASPDLSAGDSAAAILDALRRRRSTDRPAASSAARAIGFAPGRRQSLLVVAIDCYGDDGKPNVEQLKKVVELAMSAGDGDDAGGRGYVLSTGMTIPEAVDALRACGADPAGFDALICSSGAEICYPWKGEQLAADEEYAGHVAFRWPGDHVRSAVPRLGKADGAQEADLAVDAAACSVHCHAYAAKDASKVKKVDWIRQALRMRGFRCNLVYTRACTRLNVVPLSASRPRALRYLSIQWGIDLSKVAVLVGEKGDTDRERLLPGLHRTVILPGMVAAGSEELLRDEDGFTTEDVVAMDSPNIVTLADGQDIAAAAADLLKAI

SEQ ID NO: 8955 - protein, 855 aa, Oryza sativa
MASKLSFKRMDSIAETMPDALRQSRYQMKRCFQRYVSKGKRLLKNQQLMEELEKSLDDKVENEKLVEGFLGYIICSTQEAVVLPPFVAFAVRMNPGIWEYVKVHSDDLSVEGITPSEYLKFKETLYDEKWAKDDNSLEVDFGALDLSTPHLTLPSSIGNGLQFVSKFMSSKLGGKPESMKPLLDYLLTLNYRGEKLMINDTIDTVSKLQTALLLAEVFVSGLPKYTPYLKFEQRFQEWGLEKGWGDTAERCKETLNCLSEVLQAPDPTNMEKFFSRVPSIFNIVIFSIHGYFGQEKVLGLPDTGGQVVYILDQVRAMEEELLQRIKQQGLHVTPKILVLTRLIPDAKGTKCNVELEPVENTKYSHILRVPFKTEDGKDLRQWVSRFDIYPYLERYAQNSCAKILDILEGKPDLIIGNYTDGNLVASLLSNKLCVTQGTIAHALEKTKYEDSDVKWREMDQKYHFSCQFTADMISMNTSDFIITSTYQEIAGSKEKPGQYEHHYAFTMPGLCRYATGINVFDPKFNIAAPGADQSIYFPFTQKQKRLTDLHPQIDELLYSKDDTDEHIGYLADRNKPIIFSMARLDKVKNITGLVEWYGQNKKLRDLVNLVVVAGLLDASQSKDREEIEEINKMHNLMDRYQLKGQIRWIKAQTDRVRNGELYRCIADTKGAFVQPALYEAFGLTVIEAMNCGLPTFATNQGGPAEIIIDGVSGFHVNPINGREAGIKIADFFQKCKEDPSYWNKVSTAGLQRIYECYTWKIYATRVLNMGSTYSFWKTLNKEERQAKQRYLQIFYNVQYRNLAKAVARAGDQQARQTTTGVAPSEIVVRPKERKPQTRMQRILTRLAGQKPPVSE

SEQ ID NO: 8956 - protein, 1066 aa, Oryza sativa
MAGNDWINSYLEAILDAGGAAGEISAAAGGGGDGAAATGEKRDKSSLMLRERGRFSPARYFVEEVISGFDETDLYKTWVRTAAMRSPQERNTRLENMSWRIWNLARKKKQIEGEEASRLAKQRLEREKARRYAAADMSEDLSEGEKGENINESSSTHDESTRGRMPRIGSTDAIEAWASQHKDKKLYIVLISIHGLIRGENMELGRDSDTGGQVKYVVELARALGSTPGVYRVDLLTRQISAPDVDWSYGEPTEMLSPRNSENFGHDMGESSGAYIVRIPFGPRDKYIPKEHLWPHIQEFVDGALVHIMQMSKVLGEQVGSGQLVWPVVIHGHYADAGDSAALLSGALNVPMIFTGHSLGRDKLEQLLKQGRQTRDEINTIYKIMRRIEAEELCLDASEIIITSTRQEIEQQWGLYDGFDLTMARKLRARIKRGVSCYGRYMPRMIAVPPGMEFSHIVPHDVDQDGEEANEDGSGSTDPPIWADIMRFFSNPRKPMILALARPDPKKNITTLVKAFGEHRELRNLANLTLIMGNRDVIDEMSSTNSAVLTSILKLIDKYDLYGQVAYPKHHKQSEVPDIYRLAARTKGVFINCAFIEPFGLTLIEAAAYGLPMVATRNGGPVDIHRVLDNGILVDPHNQNEIAEALYKLVSDKQLWAQCRQNGLKNIHQFSWPEHCKNYLSRVGTLKPRHPRWQKSDDATEVSEADSPGDSLRDVHDISLNLKLSLDSEKSSTKENSVRRNLEDAVQKLSRGVSANRKTESVENMEATTGNKWPSLRRRKHIVVIAIDSVQDANLVEIIKNIFVASSNERLSGSVGFVLSTSRAISEVHSLLTSGGIEATDFDAFICNSGSDLCYPSSNSEDMLSPAELPFMIDLDYHTQIEYRWGGEGLRKTLICWAAEKSEGGQVVLVEDEECSSTYCISFRVKNAEAVPPVKELRKTMRIQALRCHVLYSHDGSKLNVIPVLASRSQALRYLYIRWGVELSNMTVVVGESGDTDYEGLLGGVHKTIILKGSFNAVPNQVHAARSYSLQDVISFDKPGITSIEGYGPDNLKSALQQFGILKDNV

SEQ ID NO: 8957 - protein, 1056 aa, Spinacia oleracea
MAGNDWINSYLEAILDVGGQGIDASTGKTSTAPPSLLLRERGHFSPSRYFVEEVISGFDETDLHRSWVRAASTRSPQERNTRLENLCWRIWNLARKKKQIEGEEAQRLAKRHVERERGRREATADMSEDLSEGERGDTVADMLFASESTKGRMRRISSVEMMDNWANTFKEKKLYVVLISLHGLIRGENMELGRDSDTGGQVKYVVELARALGSMPGVYRVDLLTRQVSAPGVDWSYGEPTEMLSSRNSENSTEQLGESSGAYIIRIPFGPKDKYVAKELLWPYIPEFVDGALSHIKQMSKVLGEQIGGGLPVWPASVHGHYADAGDSAALLSGALNVPMVFTGHSLGRDKLDQLLKQGRLSREEVDATYKIMRRIEAEELCLDASEIVITSTRQEIEEQWQLYHGFDLVLERKLRARMRRGVSCHGRFMPRMAKIPPGMEFNHIAPEDADMDTDIDGHKESNANPDPVIWSEIMRFFSNGRKPMILALARPDPKKNLTTLVKAFGECRPLRELANLTLIIGNRDDIDEMSTTSSSVLISILKLIDKYDLYGQVAYPKHHKQSDVPDIYRLAAKTKGVFINPAFIEPFGLTLIEAAAYGLPIVATKNGGPVDIIGVLDNGLLIDPHDQKSIADALLKLVADKHLWTKCRQNGLKNIHLFSWPEHCKNYLSRIASCKPRQPNWQRIDEGSENSDTDSAGDSLRDIQDISLNLKLSLDAERTEGGNSFDDSLDSEEANAKRKIENAVAKLSKSMDKAQVDVGNLKFPAIRRRKCIFVIALDCDVTSDLLQVIKTVISIVGEQRPTGSIGFILSTSMTLSEVDSLLDSGGLRPADFDAFICNSGSELYYPSTDYSESPFVLDQDYYSHIDYRWGGEGLWKTLVKWAASVNEKKGENAPNIVIADETSSTTHCYAFKVNDFTLAPPAKELRKMMRIQALRCHAIYCQNGTRLNVIPVLASRSQALRYLFMRWGVELSNFVVFVGESGDTDYEGLLGGVHKTVILKGIGSNTSNFHATRAYPMEHVMPVDSPNMFQTGGCNIDDISDALSKIGCLKAQKSL

SEQ ID NO: 8958 - protein, 805 aa, Nostoc sp.
MHELFHPIFANGEEKAALQQLIIALDASGKRYFLRNEILHTFSQYCQQAQKPTYFYYSSSVGKLIQYTHEIVLAEDGTWFVVRPRIASQEVWRLTSDLAKFDSMSIDAFLDVSDRLVNAYEPNILEIDLNSFYEASPSISDPRNIGQGLAFLNRYLCSQIATDPQYWVELVYLALRGLQYDGINLMIGDAIPSGIHLAKQIHAAIKFLSALPPEEPYEKFYIELQKLGFEPGWGNTAQRILETITLLDKLIDSPQPAVLEAFVARVPAVFRVVLVSIHGWVAQEDVMGRDETLGQVIYVLEQARSLENKLQQEIKLAGLEVLGIQPHVIILTRLIPNCEGTYCNLRLEKLHNTENAWILRVPFGEFNPEITNNWISKFEIWPYLETFALDAEKQLLAQFQGKPNLIIGNYSDGNLVAFLLARRLKVTHCNIAHSLEKPKNLFSNLYWQDSEEKYHFSVQFTADLITMNAADFIITSSYQEIFGTPESIGQYESYKFFTMPHLYHVVDGIDLFNPKFNMVPPGVNEQVFFPYSQTADRDPNVSKHVHDLLFHRQDSQIFGYLDQPQKPPIFAVAPITSIKNLTGLAECFGRSQELQAHSNLILLTSKLNIDESTNPEEAREIEKLHNIINQYQLHGHIRWLGLRLPNQEVGEAYRLVADYRGIYIHFARFEAFGRSILEAMISGLPTFATKFGGSLEIMEDQNNGFRINPTDLEGTAEKILAFFQECDTHPEHWQEVSQWMSQRIHQKYNWQLHTSQLLALTKIYSFWNFIRPESSEARVRYMESLFHLIYKPRAEQILAKHMSCH

SEQ ID NO: 8959 - protein, 808 aa, Arabidopsis thaliana
MANAERVITRVHSQRERLDATLVAQKNEVFALLSRVEAKGKGILQHHQIIAEFEAMPLETQKKLKGGAFFEFLRSAQEAIVLPPFVALAVRPRPGVWEYVRVNLHDLVVEELQASEYLQFKEELVDGIKNGNFTLELDFEPFNAAFPRPTLNKYIGDGVEFLNRHLSAKLFHDKESLHPLLKFLRLHSHEGKTLMLNNRIQNLNTLQHNLRKAEEYLMELKPETLYSEFEHKFQEIGLERGWGDTAERVLNMIRLLLDLLEAPDPCTLENFLGRIPMVFNVVILSPHGYFAQDNVLGYPDTGGQVVYILDQVRALETEMLQRIKQQGLNITPRILIITRLLPDAAGTTCGQRLEKVYGSQYCDILRVPFRTEKGIVRKWISRFEVWPYLETFTEDVAAEISKELQGKPDLIIGNYSDGNLVASLLAHKLGVTQCTIAHALEKTKYPDSDIYWKKLDEKYHFSCQFTADLIAMNHTDFIITSTFQEIAGSKDTVGQYESHRSFTLPGLYRVVHGIDVFDPKFNIVSPGADMSIYFAYTEEKRRLTAFHLEIEELLYSDVENEEHLCVLKDKKKPIIFTMARLDRVKNLSGLVEWYGKNTRLRELVNLVVVGGDRRKESQDNEEKAEMKKMYELIEEYKLNGQFRWISSQMNRVRNGELYRYICDTKGAFVQPALYEAFGLTVVEAMTCGLPTFATCNGGPAEIIVHGKSGFHIDPYHGDKAAESLADFFTKCKHDPSHWDQISLGGLERIQEKYTWQIYSQRLLTLTGVYGFWKHVSNLDRLESRRYLEMFYALKYRPLAQAVPLAHEE

SEQ ID NO: 8960 - protein, 816 aa, Oryza sativa
MGETTGERALTRLHSMRERIGDSLSAHTNELVAVFSRLVNQGKGMLQPHQIIAEYNAAIPEGEREKLKDSALEDVLRGAQEAIVIPPWIALAIRPRPGVWEYLRINVSQLGVEELSVPEYLQFKEQLVDGSTQNNFVLELDFEPFNASFPRPSLSKSIGNGVQFLNRHLSSKLFHDKESMYPLLNFLRAHNYKGMTMMLNDRIRSLDALQGALRKAEKHLAGITADTPYSEFHHRFQELGLEKGWGDCAQRVRETIHLLLDLLEAPEPSALEKFLGTIPMVFNVVILSPHGYFAQANVLGYPDTGGQVVYILDQVRAMENEMLLRIKQQGLNITPRILIVTRLLPDAHGTTCGQRLEKVLGTEHTHILRVPFRTENGTVRKWISRFEVWPYLETYTDDVAHEISGELQATPDLIIGNYSDGNLVACLLAHKLGVTHCTIAHALEKTKYPNSDLYWKKFEDHYHFSCQFTADLIAMNHADFIITSTFQEIAGNKETVGQYESHMAFTMPGLYRVVHGIDVFDPKFNIVSPGADMSIYFPFTESQKRLTSLHLEIEELLFSDVENTEHKFVLKDKKKPIIFSMARLDHVKNLTGLVELYGRNPRLQELVNLVVVCGDHGKESKDKEEQAEFKKMFNLIEQYNLNGHIRWISAQMNRVRNGELYRYICDMRGAFVQPALYEAFGLTVIEAMTCGLPTFATAYGGPAEIIVHGVSGYHIDPYQNDKASALLVEFFEKCQEDPNHWIKISQGGLQRIEEKYTWKLYSERLMTLSGVYGFWKYVTNLDRRETRRYLEMLYALKYRKMATTVPLAIEGEASTK

SEQ ID NO: 8961 - protein, 816 aa, Unknown
  Description of Unknown: Oryza sativa Japonica Group sequence
MGEAAGDRVLSRLHSVRERIGDSLSAHPNELVAVFTRLVNLGKGMLQAHQIIAEYNNAISEADREKLKDGAFEDVLRSAQEGIVISPWVALAIRPRPGVWEYVRVNVSELAVELLTVPEYLQFKEQLVEEGTNNNFVLELDFEPFNASFPRPSLSKSIGNGVQFLNRHLSSKLFHDKESMYPLLNFLRAHNYKGMTMMLNDRIRSLSALQGALRKAEEHLSGLSADTPYSEFHHRFQELGLEKGWGDCAKRSQETIHLLLDLLEAPDPSTLEKFLGTIPMVFNVVIMSPHGYFAQANVLGYPDTGGQVVYILDQVRAMENEMLLRIKQQGLNITPRILIVTRLLPDATGTTCGQRLEKVLGTEHTHILRVPFRTENGIVRKWISRFEVWPYLETFTDDVAHEIAGELQANPDLIIGNYSDGNLVACLLAHKMGVTHCTIAHALEKTKYPNSDLYWKKFEDHYHFSCQFTTDLIAMNHADFIITSTFQEIAGNKDTVGQYESHMAFTMPGLYRVVHGIDVFDPKFNIVSPGADMSIYFPYSESRKRLTSLHPEIEELLYSEVDNNEHKFMLKDRNKPIIFSMARLDRVKNLTGLVELYGRNPRLQELVNLVVVCGDHGNPSKDKEEQAEFKKMFDLIEQYNLNGHIRWISAQMNRVRNGELYRYICDTKGAFVQPAFYEAFGLTVVESMTCGLPTFATAYGGPAEIIVNGVSGFHIDPYQGDKASALLVEFFEKCQEDPSHWTKISQGGLQRIEEKYTWKLYSERLMTLTGVYGFWKYVSNLERRETRRYLEMLYALKYRTMASTVPLAVEGEPSNK

SEQ ID NO: 8962 - protein, 600 aa, Chlorella variabilis
MPALETVFEDLVGTPVSERTPHGPLENRFDRLYVILISLHGLVRGDRMELGRDSDTGGQVKYVVELAKALALHPSVYRVDLLTRLIQDPAVDASYGQPQECLVKGRGELGGAYIVRLPCGPPQQYVRKELLWPYVREFADRGIAHANATLAAMAESGRRCELYAVHGHYADAGEVAVLMSSSLDVHMVMTGHSLGRNKLEHLLASGAMTRSEIEAAYAISRRIEAEERCLDNAVMVFTSTKQEVDEQWGLYDGYSPQLSRVLRFHRSYGRHMPNMKVIPPGLDFSSLKVSMPEDPTLREFEQARAVQDLLEKPQPLSPRATATSGATSPRRLEAGQEVEPAAGGAGAGGTAPHTPSIASGGAAGQQSPRGDSSSGAADPPTPRPAADMALDPHAGPPIWREISRYLRNPLKPAILAMSRPDPKKNLTTLVEAFGKHAMLRELANLVLIMGNRDNIDSMASGSQKVLTQVLKLIDSHDLYGSVAYPKHHTQMDISDIYLFAFATRGVFVNIALQEPFGLTVIEAAAHGVPTVATKNGGPVDIMATLHHGVVVDPTNPDAVAAALLRILTNPQTWDDMSGSGIRNIMAYSWPSHCKKYLESI

SEQ ID NO: 8963 - protein, 805 aa, Beta vulgaris
MASRLTRVPSLKERLDETLTAQRNEIISFLSKIASHGKGILQPHEVLSEFEAVADKHKLADGPFGEVLRHTQETIVLPPWITLAVRPRPGIWEYIRVNVDALAVEELTPSQFLHVKEELVDGSTNGNFVLELDFEPFTASFPRPTLSKSIGNGVEFLNRHLSAKMFHDKESMRPLLDFLRMHHYKGKTIMLNDRIQNLDSLQAVLRKAEEFLTTIPADTPYSEFDHKFQEIGLERGWGDNAERVMDMIQLLLDLLEAPDSCTLEKFLGRIPMVFNVVILTPHGYFAQANVLGYPDTGGQVVYILDQVRALEHEMLLRIKQQGLDIIPRILIVSRLLPDAVGTTCGQRLEKVFGTEHSHILRVPFRTEKGIVRRWISRFEVWPYLETYTEDVANEIAGELQAKPDLIIGNYSDGNIVASLLAHKLGVTQCTIAHALEKTKYPNSDIYWKSFEEKYHFSCQFTADLIAMNHTDFIITSTFQEIAGNKDTVGQYESHMAFTLPGLYRVVHGIDVFDPKFNIVSPGADLSIYFNYTEEKKRLTALHPEIEELLFSETQNEEHICVLKDRKKPIIFSMARLDRVKNMTGLVEWYGKNKKLRELVNLVVVAGDRRKESKDTEEKEEMKKMYSLIEEYNLNGQFRWISAQMNRVRNGELYRYIADTRGAFVQPAYYEAFGLTVVEAMTCGLPTFATCHGGPAEIIVHGKSGFHIDPYHGDKAADLLVDFFEKSTADPSYWENISKGGLQRIEEKYTWKIYSDRLLTLAGVYGFWKYVSNLDRREARRYLEMFYALKYKKLAESVPLAIEDAN

SEQ ID NO: 8964 - protein, 677 aa, Anabaena sp.
FGPFYDYTPTIRDPKNIGKGVQYLNRYLSSKLFQDSQQWLESLFNFLRLHNYNGIQLLINHQIQSQQQLSQQVKNALNFVSDRPNDEPYEQFRLQLQTMGFEPGWGNTASRVRDTLNILDELIDSPDPQTLEAFISRIPMIFRIVLVSAHGWFGQEGVLGRPDTGGQVVYVLDQAKNLEKQLQEDAILAGLEVLNVQPKVIILTRLIPNSDGTLCNQRLEKVYGTENAWILRVPLREFNPKMTQNWISRFEFWPYLETFAIDSERELLAEFQGRPDLIVGNYTDGNLVAFLLTRRMKVTQCNIAHALEKSKYLFSNLYWQDLEEKYHFSLQFTADLIAMNAANFVISSTYQEIVGTPDSIGQYESYKCFTMPELYHVVNGIELFSPKFNVVPPGVNENSYFPYTQTQNRIESDRDRLEEMLFTLEDSSQIFGKLDDPNKRPIFSMARLDRIKNLTGLAECFGQSQELQERCNLILVAGKLRIEESEDNEEKDEIVKLYRIIDEYNLHGKIRWLGVRLSKNDSGEIYRVICDRQGIFVQPALFEAFGLTILESMISGLPTFATQFGGPLEIIQDKINGFYINPTHLEETATKILDFVTKCEQNPNYWNIISEKAIDRVYSTYTWKIHTTKLLTLARIYGFWNFTSKEKREDLLRYLESLFYLIYKPRAQQLLEQHKYR

SEQ ID NO: 8965 - protein, 1054 aa, Craterostigma plantagineum
MAGNDWINSYLEAILDVGPGIDEAKGSLLLRERGRFSPTRYFVEEVVSGFDETDLHRSWIRAQATRSPQERNTRLENMCWRIWNLARQKKQLENEEAQRMAKRRLERERGRREAVADMSEDLSEGEKGDIVVDHSHHGESNRGRLPRINSVDTMEAWMNQQKGKKLYIVLISLHGLIRGENMELGRDSDTGGQVKYVVELARALGSMPGVYRVDLLTRQVSSPEVDWSYGEPTEMLPPRNSENMMDEMGESSGSYIVRIPFGPKDKYVAKELLWPHIPEFVDGALGHIIQMSKVLGEQIGNGHPIWPAAIHGHYADAGDSAALLSGALNVPMLFTGHSLGRDKLEQLLRQGRLSRDEINSTYKIMRRIEAEELSLDASEMVITSTRQEIEEQWRLYDGFDPILERKLRARIKRNVSCYGRFMPRMMVIPPGMEFHHIVPHDGDLDAEPEFNEDSKSPDPHIWTEIMRFFSNPRKPMILALARPDPKKNLTTLVKAFGECKPLRELANLTLIMGNRDNIDEMSGTNASVLLSILKMIDKYDLYGLVAYPKHHKQSDVPDIYRLAAKTKGVFINPAFIEPFGLTLIEAAAHGLPIVATKNGGPVDIHRVLDNGILVDPHNQESIADALLKLVAEKHLWAKCRANGLKNIHLFSWPEHCKSYLSKLASCKPRQPRWLRNEEDDDENSESDSPSDSLRDIQDISLNLKFSFDGDKNESREKGGGSHPDDRASKIENAVLEWSKGVAKGPQRSMSIEKGEHNSNAGKFPALRRRKIMFVIAVDCKPSAGLSESVRKVFAAVENERAEGSVGFILATSFNISEIRHFLVSEKLNPTDFDAFICNSGGDLYYSSHHSEDNPFVVDLYYHSQIEYRWGGEGLRKTLVRWAASITDKKGEKEEHVIIEDEETSADYCYSFKVQKPNVVPPVKEARKVMRIQALRCHVVYCQNGNKINVIPVLASRAQALRYLYLRWGMELSKTVVVVGESGDTDYEEMLGGVHKTVVLSGVCTTATNLLHANRSYPLADVVCFDDLNIFKTHNEECSSTDLRALLEEHGAFKA

SEQ ID NO: 8966 - protein, 450 aa, Dongia sp.
MKVLVASTPASGHIDPMFSLARILVGAGHQVAGLSATAFRARIESAGAKFFPFPDRADFDLRDISIAFPAYKTISPGIEMSRFYLEKVFIDAIPAQVEGLREALRVFSADVILGDDFFLGALPILLGPRSERPAVVLCGTTFLHYRRDDGAPNFVGLPPATSRADLEAYAAIAEEHEELLYAPTRRYFNACLAALDVGPLAMDPHEAVITLPDAYLQLTVPSFEFPRRNLPRSVRFVGTPPLVPGQASIPEWAAELDGSRKVVLVTQGTLSNLDLGQLIVPTMAALAEEPDLLVVVTGGGRSSSALPGPIPSNVRFASYLPFEWLLPKTDLLVTNGGYGSLNQALSFGIPIVSAGLSEDKADVNARVAWSGVGIDLKAQQPSESALHQAIRRVLDLPNYRQRALAVSEEFARLDGRSRILSILERASAGSETQSAERAPIECRRYSGWVE

SEQ ID NO: 8967 - protein, 391 aa, Streptomyces sp.
MSRRPAHIAMIGVPAVSHVLPSLAVVRELVARGHRVTYANDPAVADLIKATGAEFVPVTSVLPVADNNWPDDPIAAMGLFLDDAVQSLPQVRAVYDADPADLYLYDIGAYAARALAESQGRPLVQLSPTFVAWEGYAEEVAAPLWQLPGADEYRARFGRWLARCGATTTDVETFCGPPSRSLALIPRAMQPYADKVDTGTVTFVGPCFGPRGDEDTWTRPAGARRVLLVSLGSAYTRQPEFYRNCLAAFGELPGWHVVLQIGRHTDPRELGTVPPGVDVRTWVPQVAVLAEADAFVTHAGMGSSGEGLSAGVPMIAVPQGAEQFMNADRLVELGVARRIDTADASAEALRTALLELVDDPDVARRSAELRARARAEGGTARAADLVEDALG

SEQ ID NO: 8968 - protein, 436 aa, Unknown
  Description of Unknown: Mycolicibacterium vanbaalenii PYR-1 sequence
MPEILIATCPPVGHLSPLLNVARGLVARGDRVTVLTSARHADKIRAVGAEPRPLPHAADYDDSTLDADLPGRAATAGLARINFDIESIFVRPLPHQFSALQELLVTDRFDAVIADALFLGTLPLLLGDPAKRPPILSYSTTPLFLTSRDTAPAGPGIAPMPGMIGRLRNRVLARATQSVLLRPGQRAADRMLEAMGLPELPVFILDSAVLADRVIVPTVPEFEYRRSDLPSHVRFVGPVSPLPGSDFVAPPWWGELNAGRPVVHVTQGTIDNADLTRLIEPTIEALADEDVTVVATTGGRPISQIRIPLPANTFVAKYVPHDVLLPMVDVMVTNGGYGAVQRALSDGVPVVVAGHTEDKPEVAARVRHFGVGIDLRTGTPTPTQVRRAVRKVLHEPGFRTKAGWLRSAYAAYDSVAEIAKLVDEAVAQRTQPLQSA

SEQ ID NO: 8969 - protein, 387 aa, Micromonospora aurantiaca
MSTWGWRSHFYSLVPLGWALQAAGHEVRVASHPSMAATISAAGLAAVPLGADVDFAEAFAGRIGTVAPLAGSASAGAVVPAITADGGVVRFADAVLDDLVSFGRSWRPDLVLWEPFNLAAPVAAAALGVPGVLNLWGPDSSTTLRMDPDQVVGPLAARFGLRAADVPLDGVLTLDPVPPPMQVPTARPGRPVRFVPYNGPAVVPDWLRRPAGRPRVCVTAGTMMAAAGLHDRFDLGGVIRAVAELDVEVVVVVEPRQHEGLGPLPARVRLVDGPLAVRLVLPTCAALVQQGGAGTTMTALAYGVPQLVLPQVSDQHFNAERLAATGAGTSLTGEQATADAVRELVGELVGDGPRRRAATSMRDRVHAMPAPADLVPALAALARGGPI

SEQ ID NO: 8970 - protein, 402 aa, Streptomyces leeuwenhoekii
MRILCTTLGSPSHGRAQLPLLRALAEAGHQVAVATTDGLAHVFRDDDVEVNAVLPDVDPVGMLGPFLGELRDSADLSLSSPALMRMLMRALAGPGVKPHLDVLAPLARDFRPDLILRDGMDMGAVLTAELLEVPQLPTPSGFSNIIEPAEVLPTLNERRRELGLPQRDDPLSFVPHGRVDYVPPAFSFSRHLPPALSYRQTVDVERHGALPPWAAGLPTDRPLVYAGIGTALPVMREQTAQGAPQLPVELPDAAESLEAIVGAAAELEECTVIVSTSGIPLDTAGLPGHVHVTERVPQPLLLESMDLFVTHGGFNSVREALRTGTPLAVLPHFGDQHTNAERVAELGLGGHITDRSARGIAKMCRALLADPAPRARARSAQLAMLTLPDIGQAVSDLEGIAG

SEQ ID NO: 8971 - protein, 374 aa, Escherichia coli
MRKRILFIGPPLYGLLYPLISLAQAFRVIGHDVVISSAGKFANKAAEAGLVVFDAVPGLDSEAGYRHQEELRKKSNIIGHFSFFSDEMADNLIDFAGKWRPDLIVYPPLDPAGPLVAAKYRIPSVMLAVGFAHTSAHIQMLNRSLSNAYRRHGVSGPLCDLAWIDVAPPSMSILKNAGEPVISMRYIPYNGGAVKETWWDRDSDRKRLLISLGTVKPMVDGLELISWVMDSANEVDADIILQLAINARTGLRKLPSNVRLVDWIPMGVFLNGADGFIHHGGAGNTLTALYSGIPQIVFGEGADRSVNAEIVAKRGCGIIPDKHGLTSDLVNRLLYDDSLRFCSDQVAAEMAEQPSPAEIAEVLMRKLKNNGKQL

SEQ ID NO: 8972 - protein, 392 aa, Unknown
  Description of Unknown: Actinobacteria bacterium OV450 sequence
MSHDALRSHIAVFNVSMAGHVLPTLAVVRQLVLRGHRVSYAVTAEFGDQVRAVGAAPVLYDVPSAGEAPEDLAVGAAQAVEVNRAAVPQLEPAFADDRPDLVLYDVYAWAGPMLAARWGVPAVLLSPTHLPYDGVLSEMFGVDDLTRMPGFADLERAFTGYGVPGGARTVTLAPPHAIAFLPRTFQRRPETVRAAEAHWVGPALGDRSFQGNWRAPDNGWPVVYVSLGSQYNHRPEFYRMCAEAFTGLGVHVVMSVGAEVAQAGIGELPEGFEVHAAVPQLDVLAACSVFVTHGGMGSIMEAVALGVPLVVVPQMAEQRVNAECVQALGLGVHLPREQATGEALRDAVRTVRDDPHVRAALATLGQEVSQAGGSSAAADIVEKLLANRPMTS

SEQ ID NO: 8973 - protein, 370 aa, Klebsiella pneumoniae
MRILFIGPPLYGLLYPVISLAQAFRVNGHEVVVASAGKFTHKAADAGLVVFDAAPGLDSEAGYRHQEELRKKSNTVGHFSFFSDEMADRLVDFAGQWHPDLIVYPPLGLAGPLIAAKYGIPSVMQTVGFAHTSAHIQMVTRSLGNAYRRHGVSGPPRDLAWIDVTPPSMSILKNDGEPVISMRYVPYNGGAVREPWWDRAPGRKRLLISLGTVKPMVDGLDLISWVMDSANEVEADIILQLAMNARAGLRKLPSNVRLVEWIPMGVFLNGADGFIHHGGAGNTLTALYNGIPQIVFGEGADRPVNAKAVAERGCGIIPGDHGLTSDLVNTFLYDDSLRLCSAQVAAEMAEQPSPAEIAGVLVAKLKTIWQ

SEQ ID NO: 8974 - protein, 397 aa, Haliangium ochraceum
MTRILIVTLPERGHYHPLLGPAEELSRRGAEVVFACSHDIGDDLADVGVERFVAPPGAAPLSDELRGAELARLLADPEALRGWIRDMLAIGPARHVEPMRAIVRELRPDVVAIDAMAYEGAIAAELEGVPWVGWATSLNPAIPAWLDSELIRTLRALDPVRHALFAEFGLRARFRVSDVLSPRGTAVFATDALIAPTRAGEPVDDDVHLVGPSLGGRRSHASPDLGFADGRPLIYASFGSQAWHQPQRFERLFEAARTLDAALLVAAGDLAAEYAAQNLPAHVRCVPFAPQLEVLAHARALVTHGGANSVMEALAAGVPLLVAPLCNDQPHNRLFVERAGAGLGIDLDTCAQDALLSALRALLADGRERTAAQRIAASYAASDGARGAAELALRCCP

SEQ ID NO: 8975 - protein, 391 aa, Klebsiella pneumoniae
MRILFIGPPLYGLLYPVLSLAQAFRVNGHEVLIASGGKFVKKAAEAGLVAFDAAPGLDSEAGYCRHEALRKESHIGTKMGNFSFFSEEMADHLVEFAGHWRPDLIIYPPLGVIGPLIAAKYDIPVVMQTVGFGHTPWHIKGVTRSLADTYHRHGVGAAPRDMAWIDVAPPSMSILENDGEPIIPMQYVPYNGGAVWEPWWERKPDRKRLLVSLGTVKPMVDGLELITWVMDSASEVDAEIILHLSANARSDLRSLPSNVRLVDWIPMGAFLNGADGFIHHGGAGNTLTALHAGIPQIVFGQGADRPVNARVVVERGCGIIPGDGGLSSNMINAFLDNRALRDASEDVECKDKSDNCGLSKILPTSERITPAIKHGNALNDITETLQHLFLH

SEQ ID NO: 8976 - protein, 377 aa, Kribbella flavida
MRVLFTFIGGSGHFRPLVAVARAVEAAGHTVAVAGSGKVTPVVEAAGFVAFPTSGPRVADAPPAAPEPLVAVDPAAEERHFAAAFGRSGARRHAAALLELAGEWRPDVIVRDEADFGSAIAAERLGIPCATVLVLAAGSLVRKELLAEPLGQLRAEYGLPPDPGLAMLDRELVLSPFPPSFRSPDFPLPQTAFSYRTADVVPIAAVRETPTVYFTLGTVFRPDTDDLFSRVLAGLREVPAKVVVTVGERNDPAALGPQPGHVRVERFVPQEELLPYCDLVVSHGGSGSLLGALAHGLPSVLLPLGADQPHNAQRCLELGLGRVLDAVTVGPDEVAATVTEVLADQDHRRAAQRIQTEINGLPDVTRTVALLEASGRR

SEQ ID NO: 8977 - protein, 404 aa, Streptomyces violaceusniger
MFTTLGSPSHGRAQLPLARSLAAAGHEVLVVTTPALAFVFEREEVRVTTAIGDFSPSAFLGTVLAEENPQGGPPEMDGKELQAHMLRLMTKAISGPMATMLLDTLLPVAHDFRPDLILRDGMDLASCVIAEALGIPQLSTPSGASNTFDPAGILPGLNALRKRQGLATFEDPLSLIPHGRIDYVPPAFSFARHLPASWSYRQTVDVDRGAALPRWVAELPTDRPLVFAAIGTAIPMFHGNNEGDVPASPLPVPDPVDTLHAMIQGLSGLQECTVVLATSGIPVDTDGLPAHVHITKRLPQPLLLESVDLFLTHGGFNSIRESMRTATPMAVLPQFGDQPGNAQRVEELGLGRHITDPTPDGITTVCRELLADDDCRAVARRARLEMLALPEIDSAVADLEKIAG

SEQ ID NO: 8978 - protein, 391 aa, Unknown
  Description of Unknown: Actinobacteria bacterium OV320 sequence
MSRFLFVVPPLVGHLNPAVGVAAELTARGHRVAWACADPELVGRLAGPAAGAVFACGGAPPGERPADLRGPQALKFLWEWYLLPLAEAMAPGVRAAVEAFRPDVVVADQQAFAGALVAERLGLPWATSATTSAEFTDPLAGLPKVREWLDGRLAALRSAIGDPAGDADPRFSPHLVLAFSTPELAGNAHGGVRWVGPSITARPSAAGFPWEWLDGGRATVLVTLGTANTDVGGRFLEVCREVLRERADRVQGVIVDPGGTLQPRGDDKDVLILPSVPQLALLGRLERGSGAVVCHAGHNSVCEALWHGVPLVVAPIRDDQPVVAGQVTDAGAGVRVRFGRVGARQLGAAVDSVLDEPGHRAAAARIRTAFRAAGGSSAAAAHLEDLAREFR

SEQ ID NO: 8979 - protein, 402 aa, Actinosynnema mirum
MRVLFTVTGAPSHAHEMLVLGRAVLDAGHEVLVATAPSAAPGLRGSGLPSVEALPDQARFWVERLGGVVPPARPGTDYPGVDAIVDVIAGRPLLREALAGLRPVVDRFRPDLVLRDGMELAGLLVAEERGLPCLTVPSGTTNQLDPAAVLPRLNERRAEQDLPTSADPLSAHRHGHVDCLPREYSLLGVPLSPCLAYRPPSPEGRSLPAWLADLDPSRPLVYGAVGIALAATWRRDDVTALAADPVEALSGLVAALSEVDCAAVVSTGGIPVDRVPPGAPHVRVVERAPQPLLLECAQLFVTHAGANSVREAVRAGVPMVAAPLFGDQPHNAARVAALGLGVRVVDGSPADLVDACRTVLADPGFTARARHARRTVLALPPVGEVVTRLEQIAEAARSVAAV

SEQ ID NO: 8980 - protein, 387 aa, Conexibacter woesei
MRALLASTAGAGHVGPLLPFAAALARRGDDVLVVGPPGLEPAIAAAGHAFAAGADPPAQEVAEIWRRFESAPPPERSVLVNRELFGRLCTAAMLPALDRVCDEWRPDLVLREPCDFASAIAAERRAIPHAQVAISLAEVEAGSLALAAPVLDPHLPGIVERIHAAPYLTRFPRALDPSPFARTVRFRAGGAADRAGGEGAAESAGGPSAADGWRQAWPEDDERPLVYATLGSVAPTLALAAPVYRAIVDAVAELPVRVLLTVGRQPDPDTLGPLPPNVRAAAWVDQAGVLPGAAVVVCHGGSGTTFGALAAGVPLVLLPLFADQPVNARRVVEAGAGIAVAPPHAADDVRAAIEQLLSTPAHRDAAGAIAREMCAAPSVTDVLDQLV

SEQ ID NO: 8981 - protein, 443 aa, Acidovorax citrulli
MARYLLAATALPGHVMPVLAVARHLVQLGHEVRIHTGGIFRTQAENTGASFIPLLPGINHDYRELGQRHPQLQRLSPGPPRLAYGLKHFFADAIALQYEGLRSILDGGFDADAIVTDTMFCGTMPLLLGPRSDRPPVVALGISALALSSADTAMFGSALPPPANAQQRQQYQSLQAMVRRTTFDDVQRHFDGVLAQLGRPPLPGFFADAMFTLPDLYLQLTAEAFEYPRSDLPETVRFVGPLLAPPSQGFEPPPWWHTLDDGRNVVLVTQGTLANEDPNHLIVPTLQALAGMPHLHVIATTGGPVPAAVAAAAPANARVLDFVPYDRLLPKVHAMVTNGGYGSVNHALSLGIPLVVAGTTEEKPEIAARVAWTGAGINLKTGQPGRRAIADAIHQLLGNPSYRQRAQALRDAFAGYDALASIAQALENLPGPAERSRLQPALA

SEQ ID NO: 8982 - protein, 409 aa, Streptomyces angustmyceticus
MSGSRAVSQRHVAVFVFADFGHVNPTLGLTRELVARGHRVTYVVDHRYTELVERAGARAVGYTSRRGAFGKVPDPSAARLAAEGYELLVETMDTVCPLAVAALASDVPDLVLYDFESFAAARMTARILGCTTTVQLSPSHASNETFSMRAQLFDPEDPSMRQGGAALMRFTRDHGLAPDELGRFLAEWDDRNLAFLPREFQIEGASFDDRFAFVGPSVAEDGAAVPWTPPGDGRRLALVSLGTESNRQRDFFRTCLDAFDGDDWHVVMTLGRGSDLAGLGPVPPHVEVHEWLPHPVVLPHADLLVCHAGMGSVMEALYFGTPVIAVPQTFELALTARRLDDLKLGRWIDRDQLTSQTLAAAVTEIVTDPGTPERMARMRAQVRGAGGAVRAADLLEQWAADRAPSVSGV

SEQ ID NO: 8983 - protein, 412 aa, Unknown
  Description of Unknown: Mycolicibacterium gilvum PYR-GCK sequence
MPMVDVGAGLQSLGHEVTILTAAEYADLVEAAGLQMLCLPGSVVIDPPAAAPVVMRRMPPAVRRFWLGRAELDAIFAKPLAAEAESLTSALAATTYDAVVADVTFTGVLPMLLRDDARPPVVVCGVGPLTISSTDTPPFGMAWQPEAGVDYTQMTAVAHRVIMRASQRRFDRALRRAGCGRSPVFISDWPRLADGILQLSVRDFEYPRSDLPATVEYVGPVLPDGTAGFVPPPWWREIERDGTTVVHVTQGTFDNTDLNQLIGPTFEALEDLDDVLVVATTGGRAGQRIADRIPSNVLVAEWIPYSALLPNVDVMITNGGYGGVQYALGHGVPLIVAGETSDKAEVAARVAYTGVGIDLGTSSPSAAAIRAAVDAVRRDDRYREAAGKLRTVIEASTPIDAIASVLKRCADA

SEQ ID NO: 8984 - protein, 399 aa, Streptomyces sp.
MTESPRAHIAMFSIAAHGHVNPSLDVIRELVDRGHRVSYAIPASFAEKAAAVGARPVIYASTLPTDDDPDAWGTELIDNIEPFLDDALQALPQLAEAFEGDEPDLVLHDITSYPARVLAHRWGVPAVSLWPNLVPWEGYEQEVGEPMTAELKQTERGRAYYARFDGWLAENGLGHVSSDDFVARPRFGIVLIPEALQPNADRVNRGMYTFVGACQGDRSDQGEWARPAGAEKVLLVSLGSSFTKQPAFYRECVAAFGGLPGWHVVLQIGAHVDPAELGEVPDNVEVSAWVPQLAVLKQADAFITHAGAGGSQEGLATGTPMVAVPQAVDQFGNADMLQSLGVARHLPMEDADAASLREAVLALVDDPEVAARCGLLSERMAREGGTRRAADLIEAELSR

SEQ ID NO: 8985 - protein, 380 aa, Kutzneria sp.
MRILITTSPGLGHILPTISFAHAARAAGHEVLYATGGSVDAVSDAGLQVVDASPGTDYREIFMGAGARMGEQMTAARNDLQRTVEVALRMFAKVSEPTLETVVRVAEKWQPDVIVHTPMQAAGQLAAGKLGVPLVMLNLGMGQDRGLSDMRKTTYEELHEYFERHGVAEAPAPAVRFDVTPPSVRGEAEQPADVWSMRYVPYNGGSVLPEWLLDKPDRRRVLITLGTVVPGFGLGMLEPIVAAASKVDAEFVLALGDVDISSLGELPDNVRPVGYLPLGMLLSSCDAAIHHGGAGTTMTTVDAGIPQIVVPQGADQFINADTVQASGLGQRAVVTDVDVALIERLLGDEQWQANARKIRSELHAMPSPVDVVDRLAGFVG

SEQ ID NO: 8986 - protein, 371 aa, Micromonospora sp.
MRVLFMPGPAIGHAFPLVPLGWAFRAAGHEVVFVTAGDALAVARAGLPVLDAVPGRTTSDMQAQFIRDVPRLFEPIGADPIAEMEERKPYIVSAWDPFVDAHVALGEWVQPDLVVYDPIFAVGPVVAARLKVPAVAHSLGLARFTPDLLRELPGAVAMRRHGVTLPEGIRTVDIAPPSLVEGGPADISMRYVPYNGGGVLPDWLREPVARPRIAVTFGTLGGPDRFAAGIARVLAAAPGLDAEFVLAIGESAAPPDLPPNVRTTGWVPLNQLLRGCAAAIHHGGDGTTLTCAALGVRQLVLPGSPDELVTGELLRGRGLAHVLGSVDELDAAAIGRLLTDAELGRVTGEVRAEIAALPSPAEVVPRLTAAV

SEQ ID NO: 8987 - protein, 383 aa, Saccharopolyspora erythraea
MRVLLSSLPAAGHLYPLVPFAWALRCAGHDVLVAAPSDLVPEATATGLPVAAVTDGPIGLRDLLERLRRLPWFGGDHAILGSLHDFATGADDRSPLTDLVEQTLPGTEALVRDWRPDVVLRDMADLTGVLACARTGVPFAEHWWGLAAPAPARGELRRIFGDLFARFEARTPPRRALTIDPVPPSFQSDDAPPVYRSRYVPYNGRAERPALPPRSQTPRICLSFGTLLTGDGVSGLAERVLDAAHRLGAEVVLAADEPPVESHPALLAAGRLPLDQVLASCDALVHHGGSGTMLTALCHGLPQLVFPHGSDHFVNADRLRSLHLAAVLNARDDPTRVERTLHAVLTDEGMRAGTRKIADEIAAQPAPADLVPLFEATVEDLAA

SEQ ID NO: 8988 - protein, 402 aa, Micromonospora aurantiaca
MKVLFTVSSWPTHYAVMVPIGWALQAGGHEVRVLCTPSQVAPLCAAGLTPVPILDSPSDEIRLRLQYFMEAVDGVWPYPWPPLHPITGAQLDGLDDFDLTGFRERQLPEVAARAAASFDAAVEYTTAFRPDFVLHDPASLEGLLAGLVTGVKTAMVLWGPVGPAEPEHMRIVPDDISGSFARYGLGPFDAGMIKTVVDPCPSSVEPPLAAERLPVRYVPYNGTAPAPTWLLEPIDRPRVCLSWSTALRSMSGPRSFVLPEAVRALEGLDAEVVLTATAQDVAELGPVPPTVRVLERLPLRLLLPTCSAVVHHGGGGSTLTSLWAGVPQVLLTFASEQAASATRVAAAGAAVQLPGHLVDAAAIRRAIDELLADGSYRRSAVRLRGEMEQRPTPADLVDLIGV

SEQ ID NO: 8989 - protein, 417 aa, Nocardiopsis dassonvillei
MRVLLAAAAEKPHFLGMVPLAWALRAAGHEVRVASQPALEPVAAGAGLPFTAVGRDHAFWRTMKAFDLHDTLDDVPLFGRVTDPYERVPWEYLLEGYRRVVPWWWRMVNDPMVDDLVALCREWRPELVVWGSVSFSGAIAAEACGAAHVRYLWGADIFARTRARFLARMGEQPASQREDPLAAWLGTRAARYGVDFSETLVHGQATVEQVPASLRVDTPAHLEYLPVRYVPYNGRAVVPHWLRTPPTRPRVCVTLGTTLMGQDRGGDVFRDLLEGLAELDVEVVATLPAREQAKLGTVPGNARLVEYVPLHALAPTCAAMVDHGGWGTVLTGLDAGVPQVIVPSWFDDPMLADMLAARDAAVSVPHRTMTAGDVSTAVSRLLEDPALARGTARVREAMRAMPSPADLADALVRRAGG

SEQ ID NO: 8990 - protein, 406 aa, Streptomyces violaceusniger
MTPSTGAKPPTHIAMFGIAAHGHVNPSLEVIRELVARGHRVTYAIPESFAEKVAETGAEPKTYTSVLHGENVPGATGSELIDYIEPFLAEAEQALPQHLAAYEGDEPDLVMYDVTAYPAHVLAHRWGVSAVELAPSFVPWDGYREEVFEPMYAQLRCSERGRAYYARYRAWLEDNGLAGTDPDRLIGRPSRCVALIPELLQPNADRVDPSVYSFVGGCQSARREVAEWRRPERAAQTDRILLVSLGSTWTKEPGFYRACVAAFGDLPGWYVVLQIGEFVDRADLGEIPANAEVHSWIPQLSILRKADAFVTHAGAGGAQEGLACGVPMVAVPQAVDQFSNADTLEALGVGRHLPKEEATASALRKAVLDLVDDPEVAARCAALKARMAAEGGPDRAADLIEAELPV

SEQ ID NO: 8991 - protein, 402 aa, Streptomyces afghaniensis
MRVLCTTLGSPSHGRAQLPLLRALAKAGHQVLVVTTEALVPVFRDDDVQVNAALPEFDPLAAMGPYLAELGDTPDLTEPTDALARLLMRNVAGPGVKPHLDVLLPLAQDFRPDVILRDGMDMGAVLTAELLGVPQLPTPSGFSNVLDPAEALPQLNERREELGLPVRDDPLSLVPHGRVDYVPPAFSFARHLPHTWAYRQTVDVERGMVLPEWAAELPTDRPLVYAAIGTALPKMHARTEDGETPLPVKLPDATESLHAIVRAAAELDDCTVVVSTSGLPVDTEGLPGHVHVAERVPQPLLLESVDLFITHGGFNSIREAMRTGTPLAVLPHFGDQPANAERVEELGLGRHIADRSAAGIADVCRKLLADPGPRARARSAQLAMLTLPDVEQAVDDLAGLAG

SEQ ID NO: 8992 - protein, 442 aa, Unknown
  Description of Unknown: Candidatus Solibacter usitatus Ellin6076 sequence
MSRFLITCWPFVGHLYPQISVALALRDRGHEVAFYSHESTRAIVQGEGFKLFPFVQVDERRYERIHALEAKVPPTQPGHQTISVSMTAYRDMLADSIPEQVADLMPILENWRPDVLVTDLALWGPIVVIWEMTGIPVALSSTMMGSMIPGPDAPPWGPGLPPPRTSATRFLSRITELGVDIVAHNLRRRVNQIRARYGLRPMGCSVTAFTGRLPLYLIPSLPELDYNRQDQPPNVHYIGPCVWTKPVGAPPPEWLNQLPTDRPWVHATEGTAQYQEPFLLRATAQALAGLPMEVILTTGQNRDPATLGLDPLPANVRVERWLSHESLLPRCAAIVTTGGPATVMAALKAGVPLVMVPTFWEKNDNAQRVVEAGVGLRLAPRRCSPDRVRAAVMRLLEEPHFRENARRIAQRLSEASGARGAAQLLENLAHGTLASATAKAAS

SEQ ID NO: 8993 - protein, 411 aa, Unknown
  Description of Unknown: Actinobacteria bacterium OV450 sequence
MTSAHPAHIAMFSIAAHGHVNPSIEVIRELVARGHRVSYAIPASFAEKIAETGATPVIWKSTLPTDDEPEAWGTELIDNIEPFLNDAVQALPQLAAAFEGDAPDLVLHDITSYPAPVLARHWGVPAVSLSPNLVAWAGYEEEVAAPMTAALRASERGRAYYARFREWLDENGIDEDPDRFVGRPRRSIVLIPRALQPNADRVDESVYTFVGACQGDRSADQGTWRRPPAADGKKVLLVSLGSTFTRQPAFYRACIEAFGDLPDWHVVLQIGKFTDEAELGAVPANVEVHRWVPQLDILRQADAFITHAGAGGSAEGLATGTPMVAVPQAVDQFGNADVLQALGVARHVPMEEADARTLREAVVALVEDPEVAARSEAVRLRMATEGGARQAADLIEAELPPVSVRRPIVRA

SEQ ID NO: 8994 - protein, 370 aa, Amycolatopsis sp.
MIPAASALARAGHEVLVACVPQLVEEFTSAGLKAVAALPDQAECWSEITDTGHDQVIKVVVGRMLLARGYPELRKVAAWFEPDLVLRDGMEFCGCLVAEQLGIPHVAAPSGAVNTLAPAAIAPLLNERRAEFGLDVQDDPLAIYRYGRIDSLPPRYSFAAHGIPRAVAYRQPEASDRCEPLPSWITELDPGKPLVYGAIGVALPTAAASRDGGKASTIPADPVRALAALVDALSELDCTAVVSTGGVSFPRAGVPPHVRLVEHIAQPLLLQTVQLFVTHGGYNSVREAVRAGVPMVVAPLFGDQLDNARKVAELGLGEQATAPSEIAAACRKVLGSSENLARARHAQRELLALPPVDEVARRLALLASAR

SEQ ID NO: 8995 - protein, 420 aa, Micromonospora sp.
MRVLFTTFAAPSHLQIQVPIAWALRAAGHDVRIAGQPDLADAVARTGHLFVPVGEPLALSEQIDRPDDGSVDFTALADLSCRRPNRRTREYLRTALAISTDVYRALNPEPMIAQLVDLVFDWRPDLVVWDTMTFGGAVAAMAGGAAHARLLFGLDLIARARMEYRRHDAPDDPFRDWLGSALDKYGVAFAEEAVVGQWTIDPVPPSVGLATDQLRVPVRYVPYNGAATATEMTCAPAHRPRVCLTLGQSGRDVLGRDRAASAELLAAAAEIDAEIVATLDARQLAGLGPVPSNVRVVDFMALDVLLPTCSAIINHGGSGSMQTALLHGVPQVVVPDLMWDTEYKAELIERAGAGVWIRDPDFPAPALAAAVRRVLIDPSYREAAARLRREVLGAPTPADIVPALELLTEQHRRPVTAGPN

SEQ ID NO: 8996 - protein, 408 aa, Streptomyces malaysiensis
MRVMFTTLGSPSHGRAQLPLARSLAAAGHEVLVVTTPALTSVFEREEVRVTSGIGDFSPSSFLGPVLAEEAAQAGSPDPADEQSPARMLRLMAKAVSGPMATWLLDTVLPVAHDFRPDLILRDGMDLGSCVIAETLGIPQLSTPSGAANSFDPAAMLPGLNALRKRQGLAIIEDPLSLVPHGRIDYVPPAFSFARHLPASWSYRQTVDVDRGAVLPRWIAELPTDRPLMLAAIGTAIPMLRDSAHEADTPAPPMPMQDPVDTLRAMIQAVSQLEECTVVLATSGIPVDTDGVPPHVHITDRVPQPLLLESVDLFLTHGGFNSIRESLRTATPMAVLPQFGDQPGNAQRVQELGLGRHITDPTPDGIASVCREVLADDGCRARARRARLEMLALPEIDSAVPDLEKIAG

SEQ ID NO: 8997 - protein, 387 aa, Escherichia coli
MRRLPDLDRQAERDFLMRILFVGPPLYGLLYPVLSLAQAFRVNGHEVLIASGGQFAQKAAEAGLVVFDAAPGLDSEAGYRHHEAQRKKSNIGTQMGNFSFFSEEMADHLVEFAGHWRPDLIIYPPLGVIGPLIAAKYDIPVVMQTVGFGHTPWHIKGVTRSLTDAYRRHNVGATPRDMAWIDVTPPSMSILENDGEPIIPMQYVPYNGGAVWEPWWERRPERKRLLVSLGTVKPMVDGLELIAWVMDSASEVDAEIILHISANARSDLRSLPSNVRLVDWIPMGVFLNGADGFIHHGGAGNTLTALHAGIPQIVFGQGADRPVNARVVAERGCGIIPGDVGLSSNMINAFLNNRSLRKASEEVAAEMAAQPCPGEVAKSLITMVQKR

SEQ ID NO: 8998 - protein, 398 aa, Isoptericola variabilis
MRVLFATTAGLGHFRPQVPLARAVRDAGHEVRVAAPASFARHVTDAGLEHAPFDDADPEALGRVFGSLPGLAPEEANHRVVTQVFGRLDPQAALPRLAALVETWRPDVIVREPGEVASLAAAEAAGVLHVVSGIGLGRLHAWMIEGLAEPLQDLAARAGIPDRDLAAAARDEQVFTTLPASFDEPGPALPHDPVRYRAEPDGATAPPLPAWGDPDAPLVYVTFGSVAAGQPTFEPMYPLVLDALADLDARVLLTTGTHGDPDALRPWPANARVERWWPQEALMPAGGEPAATAMVGHGGFGTTTTALATGVPQVVVPLFASDQWLNARRVADVGAGLAVEAGPELVERLPGAVRSVLDDGTYRAPARRLADEMAALPPAAATVERVLTAGSTARTRPS

SEQ ID NO: 8999 - protein, 398 aa, Tsukamurella paurometabola
MLSNVKILVTGIAGYSHLVPFVLPAASALRAAGHDVTVAVPADGRDIVAGYGLDVLALDGIPTMAQIATDPALGEDDFSVRDYVPPAEPYPFTGFTAAAPRRSARAFIGVIGHRGAGALIERLSGDVPDLIVRDNTEFGGYLAAEVLGCPQLPLEVAPMFDASLPGVLDVLNEVRSLHGLPPAAAATEGPRIAQTPLDFYPPEQHVPGIHCFRPGPRTFAPLDPAIADLPADRPLVLVSLGSVAPSLGAATDLVDRIVEALGSLDVYAVVATGGHEVRTPPPNVVLTDFVDQQTVLNTCDAFITHGGFNGVREALQSGVPMVLLPLFGDHPLNSVQADRLGTGIVLDPWTVTAGELAAATEKVLADPSYGRNARRFARRSQALPELATFPERLPEILG

SEQ ID NO: 9000 - protein, 387 aa, Yokenella regensburgei
MIYLVRDVERDFLMRILFVGPPLYGLLYPVLSLAQAFRVNGHEVLIASGGKFAQKAAEAGLVVFDAAPGFDSEADYRRREALRKESNIGTKMGNFSFFSEEMADQLVEFAGHWRPDLIVYPPLGVVGPLIAAKYGIPVVMQTVGFGHTPWHIKGVTKSLSDAYRRHGVSAPPQDLAWIDVTPPSMSILQNDGEPVISMQYVPYNGGAVWESWWERTPGRKRLLVSLGTVKPMVDGLDLISWVMDSASEVDAEIILHLSANARSDLRTLPPNVRLVDWIPMGAFLNGADGFIHHGGAGNTLTALHAGIPQIVFGEGADRPVNARAVVERGCGIIPGDGGLTSGMINNFLNDRSLRDASQEVAAEMAAQPCPTEVAKRLIAALQKGSSQ

SEQ ID NO: 9001 - protein, 433 aa, Unknown
  Description of Unknown: Methylobacterium sp. Leaf361 sequence
MKVLLCSTPATGHLNPLLAIAHMLISDGHEVMVLSGSAFRDRIVAAGARFMALPGAADFDGRDLRAVVPELAEIAPGPDWLRVAMERVFVDRIPDQARGLRAALRAFPASLVIGDDMFFGALPLLLGPRAERPAIVLCGTSILHCARPDRAPVFLGLPPAETPEQEAAYGRIAEAYEAAVDRPVGLSLAAKLAELGRAAPPWPLFDAVVRLADTYLQLTVPSFEYPFPLPPTVRFIGALPIVPGQAALPPWAGDLDGARKVVLVTQGTVANHDFGLLVGPALRALADEPDILTVVTGGGRGLDAIPGPIPANARLSPYLPFEWLLPRVDAMVTNGGYGSVNQALSHGIPLVAAGLTEDKADVNARIAWSGAGIDLAANDPTPETIRKAVRTVLDAPGHRREARRLAAEFAAYDAKAEILRLLSSHGGRARSAA

SEQ ID NO: 9002 - protein, 459 aa, Colletotrichum fructicola
MTVTETCDDVKGSRKPLLLMAAFPIDGHINPLFTIASHLVKVGYEVAFSSPSAYQSKIEETGAEYILAENPITESVFLNFRDASQFPPGPGRLAAQYKAIFMDMQPTRAKTIEEALVVLQARDPHRQIIVLEDVFNSGFTAFKYGRPLPDGVKRLPKSIGFGVSPILAESQDTGPLSLGLWPDSTESGRQRNKALYELVERGPMKLLYDAWHETLKQCGCKNIPDGKIWRSFYTAHDSVLQLCSPSLEYPVSDLPPCLQFVGVLPRKPLKLGFQFPSWWSEVEKRQENNYRYVIFVSQGTLNPLWSELIIPAINAFADRPEVLVVATLGAVGAQLPAEVKIPANARIIDYLPYDAMLEYTDVFISNAGYGTLTHAVSNGVPVLLAGENEEKIEVTMRAVYAGVGLSLGTQTPTAEQVRRGVECILEDTKYKKAAMKLKLENSDLDALSAIEAKIREMTE

SEQ ID NO: 9003 - protein, 404 aa, Streptomyces leeuwenhoekii
MRVLFTTTPAPGHFHPLLPLASAARAAGHEVAFATGRPMSDLAEAMGFRTFEAGLSRDGDQDAEFLELKKSARGLPPTGIEMDRIAIARVLYGVRTRRMVPDLLALARTWRPDVVVRDSYEVGGAVAAECLGVPHAALDTTPLYDMSPLRGDIQRELDQAREEAGLAPDPEQRMLHRHLHLCCAPPSYLPSGRSRPATLRALRPMPFDRADGEELPDWVRWLPDRPLVYVTFGTITNRWVPGAFPGLFSAVLRAFEDEPVNVVATVDRDSDPADLGPQPPHIRVERYIPQSLLLPLCAAAVTHGGFNTVVGAFDAGIPQIVVPFLGDHPYNARRCAELGLARVVDPAELTTEAVREAVREVMTAPEYRAGAQRMRAELRELPGPREAVGLLERLAAGKGLEDHM

SEQ ID NO: 9004 - protein, 380 aa, Actinosynnema mirum
MSRFLFVAPPLVGHVNPLTGVARELVARGHRVAWAGHGELLGALVREPVFPCAVPEDAPVERPAGLTGPSAFQFLWRDFFVPLADAMAPGVAAAVDAFEPDVVVSDQHAVAGALVAERRGVPCVGSASTSAELVDPLASMPKVAAWVDALLAALRERHGNPLARNDPRYPEHGVLAFTTAALAGPVDRPGLHLVGPALGEPRPGVEFPWAELDGRPVVLVSLGTANTGVGGRFLRAAAEAFADRPGVRAVVVDPGGELGPVPDNVLVRHRVPQLELLPRCAAVVCHSGHNTVCEALWHGVPLVLAPIRDDQPLVAAQVVDAGAGLRLRFARAGAEAIGKAVDAVLDPAGGHRDAARAIGDSFRAAGGAGAAADHLIAVAR

SEQ ID NO: 9005 - protein, 390 aa, Kutzneria sp.
MRILVTASPGLGHMLPMVPISWALRAAGHEVLLAMSGRSPDHVPMLAASGLHVVETVRHEQFGSMLDRVRGTEDIKEIQRQIKEASRSGEFDRLSRVGVRLFVPMSEAVADAVVELADEWRPDLVLHSPMEGAGPLAAAKLGIPAVEQSFGLSSPLDRGTQFAEALADTYRRHGADGPPERHVHLDVAPRSVQPEQDGWPMRYVPFNGGGQLPGWLTAARPGRPRIAVTLGTVAPMMTGIGPVARIAALAEKIDAEFVVALGNADTSSLGELPDNVRLAGYVPLGPLLATSAAVIHHGGAGTTLTALDAGVPQIIVPQGADGPFNAAAVAAAGSGLNVTDEELDAQLVERLLTEEPLRDAAGRIRAEMHAMPSPSSVADRLTKNFGGQIS

SEQ ID NO: 9006 - protein, 408 aa, Nocardioides sp.
MKVLCYTSPARGHLFPTVPILLELRGRGHDVVVRTLDAEVARLRDLGLKAEPISPEIEAIELDDYRARTSQAGLKRTVRTFAARARIEVPEVQRLVAEEHPDLLLVDGNTWGAAAVAEASGLPWALLQHFPTPLPARDVPPFGPGLRPLAGPLGRLRNRLLRPVVLGVVERAFLPPLNEVVRPLAGASPIRDAHDLYTRAPLTLYPTSRAFEHPRTDWPDSFCFVGPLVWEPPTAPPEWLAELGRPVALVTTSSEYQDDGALVDAALAGLAHEDLDVVATLPGGSRPRRLVPANAHVEQFVPHSPVLARAAVAVTHGGMGATQKALAAGVPVVVVPWGRDQAEVARRAEATGAAVLLPRRRLSPTSLRDAVRRARRLRPAAVALAAAMAQDGGAPLAVDRLESLAGRG

SEQ ID NO: 9007 - protein, 375 aa, Kutzneria sp.
MRVLVVSAPGVGHVFPIVPLTWALRAAGHDVLVATASAGLVVAGAGLPVVDVLPGYDMRQQFAQLREQHPHFAEMGTRRVRDVKEVGEFLPFLTRPLVPGVLAAAERFRPDVIVEGSMSGAGLIAAARLGVPRVGHGFGFVRPAGMTEMFREHMAAEFEQHGVGLPERMAHVDIAPPSMIAGEPEGWSMRYVPYNGGGVEPDSLGEIPDRPRVAVTLGTVAPTMNGLGPVERIIAAAPDVDAEFVLALGEKVALDSLGPLPSNVRAAGWIPLNSLLASSSLLIHHGGAGTAMTPLTMGVPQLVAPSGADRYINADAVQDRGIGLQVEESELDARVINQLLDEDKFRTTAAEVAAEVAAMPSPAEVAARVIDFVRG

SEQ ID NO: 9008 - protein, 381 aa, Deinococcus actinosclerus
MRVGIVTATYLPSRNGVATSTALFARGLRERGHEVRIFAPRHPLMPPREDGVYRLNSSFAGARALGAPADYPVMLAPGPLLTSRLPLRGLDVLHTMHPFLAGQLALKWARLSGAPVVYTAHTQYDQYLHYAPMPKRVGRAVLRPHVSAFARRVDAVLAPGRAMVDMLREYGFQGHVDLMPNPVDLAAFRAATGAAFREAYHVAPDAPLVVSLGRLAPEKNLDVLLRAFDRARASRPDLRLLVVGDGPSREALERAAPEGVTFTGPVPYERVPQALAAADVFLTASTSEVLPMSMIEALAAGAPLVAAQSPAALDLIQEGVNGTVRAATPEALAEGLLDTLMPAQLPTLQAGARASAAQYDLTTRAAALEAVYEQVIQRKRR

SEQ ID NO: 9009 - protein, 667 aa, Umezawaea tangerina
MTDLLFAVLLAALAACCFAAAIHLQHRTVRDEGRVRVGRLLRTPTWLAGTSLAVVGGGLHVLALATAPLAVVQPIGVLSLVLTTLVGGHSRRAALAVCVGTAGFVVLAATSVAPASSTVDSSRVQLVVAIAAVVAVAGLRTGGRVRCLVLASAAAVLFGLGSALIRGAVLNGSPLLVGEAGALMLTGGWLVHQAYASGPPAVVIAAVTVLDPFTAVAVGIGLYGETGGIALPQLACAAPAIGGVVALTRSTPVDSPSWTRPEPAAGQRILIAADTYPPDVNGAANFANRLAEGLAARGHEVHVVCPSPTSQDSSTVVGGVAVHRIASTRTPFHAAFRVCTPWQVGRALPSLLATVRPDVVHVQAHFGVGRTVLRAALAHDLPVVATNHFMPENLLDHSPLPRVLNGIVSDWTWRDLVRVYRRAHAVTAPTPRAADLLRDRDLPTRAISCGIDLDRFGSAGAHMSTTTTAVFVGRLDPEKNVDELLRALVLAPAVHAEVVGDGVCRTDLESLALDLGIARRVRFHGYLPDDDLVAVLRRGDVFCMPGTAELQSIATMEAMAAGLPVVAANAMALPHLVHHGTNGRLYPPGDPAALAAALRELDADPVSRVAMGTASRRIVARHDLADTLDAFEDLYLRVQEEATGHDHTTTAPARPRRADRERTATAG

SEQ ID NO: 9010 - protein, 389 aa, Deinococcus planocerae
MRIGIVTATYLPSRNGVATSTALYVRGLRERGHDVRVFAPRHPQEPVREEGVYRLNSSFAGARALGAPADYPVMLAPGPLLTARLPLRDLDVLHTMHPFLAGRLALKWARLSGAPVVFTAHTQYDQYLHYAPMPRRVGRAMLRPHISAFARRVDAVLAPGRAMVEMLREYGYGGEVHLFPNPVDLAAFARTRGEAFRAEHHVPRDVPLVMYLGRLAAEKNLSVMLHAFAQAQASRPELRLLVVGDGPARMEAQAGAQEGVTFTGPIPYARGPEALAAADAFLTASTSEVLPMSMIEALAAGTPLVAARSPAALDLVREGVNGTVRDATPDALAAGLLEVLAPGRLPALQAGARKSAGEYDLTERAAALEAVYLQTVAREQAQGRIDRLR

SEQ ID NO: 9011 - protein, 408 aa, Arthrobacter sp.
MSYPADTEPLTILIAADTYPPNVNGAAQFGYRLARGMTGRGHEVHVLAPRASDGPSFTEGRAAWTVHRLRSHGVPTHDYWRLCYPWEIRRDISMLFDRVRPDVVHIQCHYMVGQYTLDEAVRRGIRVVATNHLMPENINPFLPFPEWFKRVIARNSWRDMGKIMGRAAAVTTPTPLAAEAMRTHARLDGVLPVSNGIDSAGYEPRPGEVLEDPEHPTVLFVGRLAEEKHVDVLIDAVARTPEHLGVHLEIVGGGEVKAALQAQAARLGIADRVRFRGLIDDTELRLSYLRASVFCQPGTAELQSLVTLEAMSASTPVLLADAMALPHLVVEGENGFLFRPGDAAELARRITQILELPEERREAMGRASRALVDHHDIRTTLDTFEALYYGSRPVRQGSTGNTGAAQRS

SEQ ID NO: 9012 - protein, 682 aa, Umezawaea tangerina
MTGIAILLAVVGAAFFALAARLQHSAVCDGDGGPRISALLRQPRWLGGLVLLVTGSGVHAVALGMAPLTVVQPVGVLAIGMTALLDGRRRALPAVALTTLAVGAFVLLAAGSATATQVAPEAEVRAGLVVLGLVALPGLLGVLSGRPHLRALSFGVAGGVAYGYVSVLMRAVSQDVQQGAFDWSSAASVLGIATALLVGGWFIQHAYAGGPAHLTVACLTVVDPLVAVGIGAGLLGESARTTGWTALAQIACACIAVGGVCVLARREQTPTGSEKLVNNGRAPRVVIAAETFPPDVNGAARFAHRLAVGLAGRGNDVHVICADPVGPARTELADGITVHRLRSRRTPFYRGFRVCLPWEVRDDVGELLDRLEPDVVHVQAHFVIGRQVLRQAAARGIPTVATNHFMPENLFGHAHVPGWLRSAASRWAWRDLAKVYSVADAVTAPTPRAVQLLHDKGFPHPAEAVSCGIDIDRYRLRPARRDDDDPTVLFVGRLDEEKRVDELLRALALVPRLRAEIVGDGSCRAEWELLAADLGVADRVRFRGFVDEESLLDAYANADVFCMPGIAELQSLATMEAMAAGKPVVAADAMALPHLVRPGRNGWLFQPGDVRGLADRLHGVLADPAVTARMGAASSELIAHHAIGTTLDRFEAIYARVTGAVPVPAAEPVPVVEPVPVVELAA

SEQ ID NO: 9013 - protein, 411 aa, Arthrobacter sp.
MSHPADSKPLTILIAADTYPPNVNGAAQFGYRLAKGMSGRGHDVHVLAPRSSNGRSFTEPGGEWTVHRLRSHSVPTHDYWRICYPWEIRRDISLLFDRVQPDVVHIQCHYMVGEYTLYEAVRRGIRVVATNHFMPENLNPFLPFPEWFKQVVARNSWKDMGKVMGKAAAVTTPTPLAAKAMRDHAFLTEVLPVSNGIDSAVYEVQPGEVVEPHEHPTVLFVGRLAEEKHVDVLIDAVARTPEHLRVHLEIVGGGEVKPALQAQAARLGIADRVTFRGLIDDDELRRSYIRASLFCQPGTAELQSLVTLEAMSASTPVLLADAMALPHLVSDGENGYLFTPGDADELGARITQILELPREDQQRMGAASRAMVARHDITTTLEIFEGLYYGTLSPNDVAAGLTTARAGGADG

SEQ ID NO: 9014 - protein, 385 aa, Deinococcus koreensis
MRIGIVTATYLPSRNGVATSTALFARGLRERGHDVRIFAPRHPLMPGHEDGVYRLNSSFAGARALGAPADYPVMLAPGPLLTGRLPLRDLDVLHTMHPFLAGQLALKWGRLAGAPVVYTAHTQYDQYLHYAPMPPSVGRAILRPHISAFARRVDAVLAPGQAMVDMLRAYGYAGAVQLFPNPVDLAAFRAAGGDAFRAEFHVPADAPLVMYLGRLAPEKNLDVMMHAFNVARASRPELRLLVVGDGPSRAQAQARALEGVTFTGPLPYARVPEALSAADVFLTASTSEVLPMSMIEALAAGTPLVAARSPAALDLIREGVNGLIRDATQSALADGLLAALHRDALAGLQARARESAAQYDLGTLAGNLEGVYQAVMGRGRRRPAG

SEQ ID NO: 9015 - protein, 677 aa, Amycolatopsis balhimycina
MTALAIVCALLAAGMFAAAAARQHREVTGLGVEGAPKLRTLARLLRSPGWWLGTGLATGGSLLHILALSLAPLAVVQPLGVFSLVLTVVFTRRARTPRVLAAVVLVLTGVTGFVTLAAFTTPTTSITFGGAESVAVTGFVLAAIAWFVQAGCAVPAAAAAVLFGLGSSVVHAAVTQPFAAAVLLGGQALLLLGAGGVLLHRAYAAGHTAVVVGTTTVLDPLTAVAVAALVYGETPHLTATVAIPAAAAALVALTGVCVLAGALPQARHRARHRAKENPVSPSGLRVLIGADTFPPDINGASFFAGRLAHGLARRGHDVHVVCPSHDGPPSTEQRDGYTIHRVRSRAIPFHGGYRFCTPGGARQATGPLLDRLRPDVVHVQAHFGVGRALLAAAAARGIPGMATNHFMPDNLLGYTPFPRRVKDTIARWAWRDLVRVYRDARLVTTPTPRAAEVLATIGLERPVEVVSCGIDLAHYAAPARPADRPTSVLFVGRLDAEKNIDQLLRAIAPLPHVRVDLVGDGTRRQELKALAGELGAAGRVTFHGFVSDAELVHRYAEADVFCMPGTAELQSLATMEAMAAGLPVVAADALALPHLVHHGTNGYLFEPGAVSTISRWIAELAADPAARDRMGAESRAIVARHDIDGALAGFEAQYRILLGLPTAAASARGNEEAVTTA

SEQ ID NO: 9016 - protein, 424 aa, Clostridium paraputrificum
MHIAAAGSGWSKSRILMLTDCYAPTVNGVVRSIVDLADGLRDAGHDVRVLTFGEGLGTSFDGHVYRLPSVSAGAVYPHARIGQMIGRRVLRLVAEWAPDVVHSHTEFSAFLWARAIARSTGAALVHTYHTLYADYTHYFCPSERIGRALVRSCTRHVMNRPDRIIAPTGKVASVLRDYGVGCPVDVIGTGVDLGRFRPDVLADAAGPAPNSTSGSASRDLAAAVGLSPGVPTVLTVGRIAAEKNLRESLALLARLDVPWQWLIVGDGPDAGNVRDHVGKLGVGDRVHMTGAVPADEVPRYYGLGDVFLTSSRSETQGLTCLESLASGVPVVCPADEAFAGVVVDGINGHRYTGADDFVAAMTALLSDADLRRSRSIAARRSAGALGRDRFVAEVLAAYGRARADAMTRCRGILRRRDAVRVRVR

SEQ ID NO: 9017 - protein, 380 aa, Deinococcus sp.
MRVGIVTATYLPSRNGVATSTALFARGLRERGHDVRIFAPRHPQVTAPEDGVYRLNSSFAGARALGAPADYPVMLAPGPLLTARLPLRDLDVLHTMHPFLAGGLALKWARLSGAPVVYTAHTQYDQYLHYAPMPERVGRAVLRPHVSAFARRVSAVLAPGQAMVDMLRAYGYGGAVELFPNPVDLAAFRAAEGAAFRAQFHVGPDTPLVVSLGRLAPEKNLDVMLRAFDQARASRPELRLLVVGDGPSRAGLQTRAPEGVTFTGPIPYARVPEALAAADAFVTASTSEVLPMSMIEALASGTPLVAARSPAALDLIAEGENGTVREPTPEALAGGLLDTLAPGQLPALKAGARASAARYDLPVRAQALEAVYERVLTARH

SEQ ID NO: 9018 - protein, 397 aa, Lactobacillus camelliae
MNIGIFTDTYFPQVSGVATSIKTLKDDLERKGHSVYIFTTTDPHVPDDAVEPNVFRFASVPFVSFTDRRVAIRGLFHAYSVAKELQLDLVHTQTEFSMGYIGKFVARQLKVPTVHTYHTMYEDYLHYVMNGHLLRPYHVKQFMRAYLYHVTQVITPSERAKQSLLGYGIKTPMTVIPTGVDLTQFKAAKDPHLRERLGLTDVPVLLSLSRVAYEKRIDKVIAAMPSVLAQVPKAVLLVVGDGPAREDLEHQAQSLGLGQHVRFIGQVDHSDVPDYYRAADIFVSASDSESQGLTYIEALAAERKVVALAASYTNSLLDDPAIGTTFTTQAEMVHQLVNYLQHPHAFDDPAPREAKLRAISADLFGDRVLKVYAHAQERFDEELAEEAERLDEPTMKG

SEQ ID NO: 9019 - protein, 363 aa, Unknown
  Description of Unknown: Halobacteriales archaeon QS_7_69_60 sequence
MQTVAAFTDTYLPTVNGVTYTLRTWRDRWERRGGRMGVVYPGGDGYDPESREYPVSSVGFPFYPGFRFGLPGVPDAARELRPDVVHAHTPFTLGLAARRLAVDRDLPLVVSYHTPAGEYADYISDAFAGVVRHAADRYEQWFFGQADAVVVPSETAADRVDGRTPTHVVSNGVDTERFAPADDAAIAAFRDRHDLPDGPLVGYTGRHGYEKRLGDLLAATAGLDVGVVLAGDGPARAELRRRAAARDDVRFLGFLDREALSTFYSALDAFAFPSPIETQGLVALEAVACGTPVVAVDGGALSESVVDGETGYHFPPGDVDGFRAAIRRVLDETAALSARCRRRRPELDVERSIERLSAVYDGL

SEQ ID NO: 9020 - protein, 392 aa, Lactobacillus equicursoris
MNIGLFTDTYFPQNSGVATSIKTLKEALEAQGHNVFIFTTTDPGVAKDSIEANIFRFSSVPFIGFSERRIAFRGFFEAAKVAKEVNLDIVHTQTEFSMGSIGKFVAKQLEIPAIHTYHTMYEDYLHYVLNGHLLRPVHVKQFTKGYLKNMDGVIAPSPRVANLLTRYGVEIPMRVIPTGVDLGAVSQGEKIDLRKKLGISEDTPVMLTLGRVAAEKKISHILKVMPELLEEFPDLIFVIAGDGPDVDQLKDQVERLTLEGHVIFTGNVEHDQVGSYYQMADLFVSASDTETQGLTYIEALANGRRCVVYKTEYTDQVFDNPVYGTTFETYRQMKEAIEAYLRQGRIEIPEDLLAKKLDEISASRFASRVCDFYQFAIDNYQVKEDKDKDDQN

SEQ ID NO: 9021 - protein, 381 aa, Deinococcus sp.
MRIGIVTATYQPSRNGVATSTALFAQGLRERGHSVSVFAPRHPLMPPHEPGVYRLNSSFAGARAMGAPADYPVMLAPGPLLTSRLPLRDLDVLHTMHPFLAGRLALNWARLSGAPVVFTAHTQYEEYLHYTPMPKRVGRAILRPHVAAFARRVDAVLAPGRAMQDMLRDYGFGGEVQLFPNPVDLAAFQQAEGLTFRAKYHIPPDAPLAMYLGRLAPEKNLAVMLHAFEQARASRPDLRLLVVGDGSSREEAQALASDAVTFTGPVPYAQVPQALAAADAFITASTSEVLPMSMIEALAAGTPLVAARSPAALDLIQEGINGTVREPNADALAAGLLEVLYPAHLPQLQAGARHSAQQYDLRARAEALEQVYLRAIARKRR

SEQ ID NO: 9022 - protein, 384 aa, Lactobacillus sharpeae
MKDQLEARGHSVYIFTTTDPHVPEDAVEPNIFRFGSVAFVSFKDRRIAVRGLFHALQVAKDLKLDIVHTQTEFSIGFIGKFVARNMHIPTVHTYHTMYEDYLHYVLNGHLLRPYHVRQMTRAFVHNDAGVVAPSDRVLEKLASYGVTAPIRVIPTGIELNAYANHSNRDVRAELGLTDVPVLISLSRVAFEKRIDRVIDAMPRILKQVPDAVLLVVGDGPARESLEEQAESLELTDHIRFIGEVDHDEVPLYYRAADIFMSASDSEAQGLTYLEAMAAGTKVLALAGDYTNALLDDPTIGRTFTRTTEMAQLAVEYLTHADEYSDATAREAKLDAISADRFGDRIVKFYEDAQVYYDETLEEKLSSRSFAKTLRLQSVWGKEEE

SEQ ID NO: 9023 - protein, 406 aa, Unknown
  Description of Unknown: Microbacterium indicum sequence
MPAVAAGSVECVPDPTRETPLTVLLGCDTFSPDINGAARFAERLSAGLAQRGHDVHVSAPNTRHALAPTHTETIEGAEITMHRLPSVRLAWHEWLRFVWPWRSKHYARLVLDEVRPDVVHIQSHIVIGRGLAREARRRGIPVVATNHTMAENILDFTRLPEWANRIFVKLAWADAKRTFQMSAAITTPTRKAADYLEKTIDIAGVVPISCGIDMAQYTPDLSPRDGNRVVFVGRLTREKRVDVILRAIAALDPALDVVLELVGDGDQRPALEQLASELGIRGRVVFHGKATDAELRAALTRASAFAIASIAELQSIATMEAMASGLPIVAANAMALPHLVEDGRNGHLFAPDDPVDLAAKLDDVLRQTPSQRERMQRASLELVSAHDITRTLRTFEALYRGEPIPA

SEQ ID NO: 9024 - protein, 415 aa, Unknown
  Description of Unknown: Brevibacterium sp. 239c sequence
MPTETYAPEVNGAAKFAERLAAGLAARGNDVHVACPSATGKASVSTENGVTVHRLTSHRWPLHPTWTICMPWETKPELSRLLDSLQPDVVHTQAHFVIGRYAFSEASKRRIPVVATNHFMPDNVRPYVRAPKPLLDGGTSIAWWDLRRKFQSADFITVPTQLAADLLTQNGFSSPIRAVSCGIDLERFAHLRDDQATASETESAGSPTTPAGSPTAAGPSATAPDTGETPPRVLFVGRLSSEKHAADIVEAVAKTDPALGLEADIVGGGDQEEPLKDLAADLGIADRIHVLGKISDKELMDAYQRCTFFCMPSTAELQSIATLEALASRKPVVLADAVALPHLVRDGVNGFLFPPRDIEELASRFTRICELPDEQLDAMSRASLDVVAKHDIEYTLDTFESIYGKVIAEGLDTAA

SEQ ID NO: 9025 - protein, 381 aa, Deinococcus sp.
MRIGIVTATYLPSRNGVATSTALYVRGLRARGHEVRVFAPRHPQASGPEEGVYRLNSSFAGARVLGAPADYPVMLAPGPRLTARLPLRDLDVLHTMHPFLAGQLALKWARLSGAPVVFTAHTQYDQYLHYAPMPRRVGRAMLRPHVAAFARRVDAVLAPGRAMVEMLRAYGFMGKVELFPNPVDLAAFREARGDAFRAEHRVPRDTPLVMYLGRLAPEKNLEGLLRAFAQARAARPALRLLVVGDGPSREAARVGAPEGVTFTGPLPYARVPEALAAADAFLTASTSEVLPMSMIEALAAGTPLVAARSPAALDLVQEGVNGTVREADPEALADGLLNVLHPARLPALQAGARASAAQYDLPTRAAALEEVYAQTVARGRG

SEQ ID NO: 9026 - protein, 401 aa, Arthrobacter sp.
MNHPAGHKPLTILIAADTYPPNVNGAAQFGYRLARGMTKRGHDVHVLAPATESGASHTEAGGEWSVHRLRSHSTPTHEYWRICLPWEIRRDVSMLFDRIQPDVVHIQCHYMVGEYTLYEAVKRGIRVVATNHFMPENVNPFLPFPSWFKEIVAKNSWRDMGRVMGKADAVTTPTPLAAKAMHDHAFLRKVLPVSNGIDSSAYELKPGEDIEPHPHPTVLFVGRLAEEKHINVLIDAIAKTPVELNVHCEIVGGGEVKPALQAQAARLGLGGRVKFLGLASDEVLRIAYLRATLFCQPGTAELQSLVTLEAMSAYTPVLLADAMALPHLVDGGENGYLFPPNDSDQLAARITELLGLPSADLERMGKASRSMAEKHDINASLATFEALYYGALTEDLLAEYI

SEQ ID NO: 9027 - protein, 663 aa, Amycolatopsis kentuckyensis
MLTLAIGLAAAGACCFAGTVHLQHRAVRGAARGPDLRLSGIRTILRTPGWYAGIGLAGLGAALHVLALTMAPLAVVQPVGVLALVLTVLLARTPLTRTVLAALAMSGAGLAGFVALSATATNAAVDAPDLGTAQWALVAAAGLAAAARSTRGRTRSLLSALGTAVLFGFTSALIRAAAVAPFSLLVIAEAVAATLAGAWLLHQAYASGPAPIVAGATTVVDPLTAVLIGVFAYGELTPGQLAVLAVPGVVAVAGLVLLARELPSPAAPARRTRPEGPLRIAITADTYPPDVNGAANFAARLASGLAARGHDVHVLCPSPGSETFTETTAGVTVHRVGSVRTPFHPTFRICPPWRTARAVPALLAAIAPDVVHTQAHFLVGRSAVRAATAAGVPVVATNHFMPENLLGYGPLPRWTHRPLTRLAWRDLVRVFGRATVCTTPTPRAAQLLEHHGLNRPVLAISCGIDRAHYAGPPDEPAAAPTVLFVGRLDAEKNVQELLEAAVALPPDVRVELVGDGSERGRLEALAARLGLADRVTFRGFVPDADLVRAYRRCTVFCMPGTAELQSLVTMEAMAAGKPVVAADAMALPHLVRPGRNGWLYPPGDVAELAARLTAVLADTPARTAMGQASLDLIAAHDLDSTLDTFEGVYLDVAARPVAVALRR

SEQ ID NO: 9028 - protein, 373 aa, Unknown
  Description of Unknown: Halobacteriales archaeon QS_6_71_20 sequence
MQTVAAFTDTYLPTVNGVTYTLQSWRERWEARGGRMDVVFPGAPDHDPADGEHTTRSVGFPFYDGFRMGLPGVPDAVRDVDVVHAHTPFALGLSGLYLSRQVDAPLVASYHTPTAEYADYLAAGPVAAVVEGAARRYERRYLNAADAVVVPSGPAGDHLRNIGVRSRVEVVPNGVDTAFFSRPDDDEVAAFRARYDLPEPEEGPLVGYTGRHGFEKELDEIPPAVAAADADATLVFGGDGPARETTAAACDAHDVDARFLGFLPREELPAFYSCLDAFVFPSPVETQGLVALEANACGTPVVGVNAGALADTVIEGETGYRYPRGDTAGFAAALDRTLAERATLSRLCLDRRERTSVDHAVRRLAEVYDRVTA

SEQ ID NO: 9029 - protein, 415 aa, Arthrobacter sp.
MSADGAPAGTAPAGASSSSTRAATRPLTILIAADTYPPHVNGAAQFCYRLAKGMKARGHKVHVAACRPDAGKAYTETLPEATVHRLRSRSVPTHEYFRISLPWEIKKDIAAIFDEINPDVVHVQSHYMIGEHVVYEAQRRGIRIVATNHFMPENLNPFLPFPQWFKNIVGKVSWRDMGKVMGRADVVTTPTPLAAKAMHQHAFLRKVLPLSNGIDAGNYELAEGEIIERHANPTVLFAGRLAEEKHIDVLIDAIAKMPADLNVHLEIVGGGEVKNALKAQAERLGLAEKVKFFGLVSDEDLRKAYIQADVFCMPGTAELQSLVSLEAMSASTPVVLANAMALPHLVDNGVNGYLFTPMDSDDLAAKITKILRLSEADRTAMGEASHAMVARHGLNKTLDTFEDIYRGGSYEDHAL

SEQ ID NO: 9030 - protein, 404 aa, Friedmanniella luteola
MSMKILLGADQYPEYINGAATFTRRLATGLAAAGHTVDLLWPAADGAHRTHLDQGVRVHRLSSVTLPGRPRMQVCTPRVVDRQVEQVLQVARPDVVHVQSHLLLGRALVRAGRRAGVPVVATNHFMPENIVPHVPVVRRFPRLASRLAWRDLEQVYAGAQLLTAPTGRAVDLLARATRLAPAEAISCGVDLDRFGAAAAEPDAADATRRGPLALFVGRLEPEKNLDQLLAAFARVPTALGARLEVVGMGSRRGQLEEQARALDLRGRVTFTGAVDDDELVAACGRADVFVMPGTAELQSLATLEAMAAGLPVVAAEAMALPHLVQDGRNGHLVPPGDVDVLARQLTRLLGDPPLRTRMGRASRAVAEGHALAATVALFDERYTQLVEDRRPVPAAAGPDLALVP

SEQ ID NO: 9031 - protein, 387 aa, Deinococcus sp.
MRIGIVTATYLPSRNGVATSTALYARGLRERGHEVRIFAPRHPQQPPHEEGVYRLNSSFAGARALGAPADYPVLLLPGPRLTARLPLRDLDILHTMHPFLAGRLALTWSRLSGAPVVFTAHTQYDQYLHYAPMPRRVGRAMLRPHVAAFARRVDTVLAPGHAMVEMLRRYGFGGEVQLFPNPVDLAAFREARGEAFRAEYGLPQDAPLAMYLGRLAPEKNLDVLLRAFARARVSRPDLRLLIVGDGPSRETAQAGAPAGVTFTGPLPYARVPEALAAADAFLTASTSEVLPMSMIEALAAGTPLVAAQSPAALDLVQAGLNGTVTEATPEALAAGLLDVLDPTRLPVLQAGARASAAQYDLPTRAAALEEVYAQTLTRRQTQSRFSR

SEQ ID NO: 9032 - protein, 397 aa, Lactobacillus nasuensis
MNIGIFTDTYFPQVSGVATSIKTLKDELERQGHAVYIFTTTDPHVADEAVEPNLFRFTSIPFVSFTDRRIAVRGVFHAYAVAKELQLDIIHTQTEFSMGYIGKFVARQLHIPVVHTYHTMYEDYLHYVMNGRLLRPYHVKQYTRAFLFHVSGVIAPSERVEATLQRYGIHIPIAIIPTGVDLSQYKAPKNPELREQLGLTHRPVLLSLSRVAYEKRIDKLISAMPKVLALVPDAVLLIVGDGPARSDLEAQASALELGSHVRFTGEIDHDEVQDYYRAADVFVSASDSESQGLTYIEALAAGRKVVALAGEYTQQLLDDPAIGTTFVTQDEFVHQVANYLQHPQAFDDPVPLQAKLHAISANQFAGSALQFYREAIARFDATADAVDVVNEHTSMKG

SEQ ID NO: 9033 - protein, 659 aa, Amycolatopsis tolypomycina
MLTLAIGLAAAGACCFAGTVHLQHRAVHRAPAGPVLRAVLRVPGWYAGIGLAGLGAALHVLALTMAPLAVVQPIGVLTLVLTVLLARTSLTRAVLAALAMSVAGLAAFVALAATATDAALPSPSLGTAQWALLAAAGLAAAARATRGRARSLLAALATAVLFGFTSALIRAAALDGGPAGFVVAEAVAATLAGAWLLHQAYASGPAPVVAGATTIVDPLSAVLIGVFAYGELTPGQLGGLAVPGVVAVAGLVLLTRALPAPAAPARRKRREGPLRIAIAADTYPPDVNGAANFAHRLATGLAARGHDVHVLCPSPGPASFTETATGVTVHRIGSRRTPFHPTFRICPPWRTARAVPALLAAIDPDVVHTQAHFLVGRHAVRAATAAGVPVVATNHFMPENLLGYGPLPRWTHRPLARLAWRDLAGVFGRATVCTTPTPRAARLLERNGLHRPVLAISCGVDRAHYAGPPAEPAGAPSVLFVGRLDAEKNVHELLEAAVSLPPEVRVELVGDGSERGRLEALAARLGIADRVTFHGFVPDAELVLAYRRCAVFCMPGTAELQSLVTMEAMAAGKPVVAADAMALPHLVRPGHNGWLYPPGDVGELARRLTAVLADEPARTAMGRASLELIAGHDLDSTVDTFEGVYRDVAVRPVPVALGR

SEQ ID NO: 9034 - protein, 364 aa, Rhodococcus erythropolis
MRALRIALIASSRYPVIQPFAGGLEAHVWHLAAALRKVGHDVTLFAGPGSDPELACELIDVRPAPISTAARSDISMPAEHFMQEHHAYLDLMLRLSRDYAESFDVIHNHSLHYLPVAMTSTLNTPVLTTLHTPPTPWLESAIAAGGSPGRFAAVSRYTAEAWRHAAGDVDVVHNGVDTDQWHQGPGGHRLIWFGRIVPEKGAHHAITAARAAGMPLVLAGPVSDHAYFRERIEPELDGTIRYLGHLVTDDLVSAVGMSAVALVTPQWDEPYGLVVAEALACGTPVVAYGRGGIPEILTPDCGRLVPADDVIALTAAIGDAMQLARPSARARAVSHCSERRMVDRYLELYDEIACASTTTRRASL

SEQ ID NO: 9035 - protein, 403 aa, Unknown
  Description of Unknown: Curtobacterium sp. B18 sequence
MSDDATTATAEPTGATGGRRPLRVLIAADTFAPDVNGAATFAEQLAVGLAERGHEVQIVAPASSRHYGTFDEELHGVTLVVHRLKSYKWPLHAWLRFVWPWSVRKWTAPILDAFQPDVLHIQSHVVVGRGMVPEAHARGIRVIATNHFMPENLLEYTPFGKRTVPIAVKIAWNDAAKTYRLADAITTPTNLAADYLRRAIAGQRVLAISCGIDATRYVAREGRPANNDIVFVGRVAPEKNLDVLVKALALLPAELDTTLTIVGDGEMIPKLTHQAKELGLEDRVRFLGFVSDEAKRQALTNSTVFAMPSTAELQSIASLEGMASGLPVVAADSMALPHLIDGNGFLFTPGDEHDLAAKLTAVLTASDDDYVAMRHRSLAMIEAHDINRTLSTFESLYRGEPVD

SEQ ID NO: 9036 - protein, 405 aa, Gryllotalpicola ginsengisoli
MGCDTFAPDVNGAARFAERLAAGLVARGHEVHVIAPAYDGVGERDEVHEGATMRVHRLFSLRWLPHDWLRFMMPWTMERNSGRILDRVKPDVVHFQSHFVVGRGLSVAAVRRGIRVVATNHTMPENMLEYTLVPKFLQPILLKWSWWDAGRIMRRACAVTTPTQRAAEYLTAGTGIPNVLAVGNGVRVAEYTPNFAPRTENRILFVGRVTGEKRIDVLLRAIPLLPESLDVKVEIVGDGDQKHHLERMAQQLSIADRVTFSGHVDEAELKRAYTRATVLAMPSTAELQSIVTMEAMSSGLPVVAADAMALPHLVHDGENGYLFRPDDEHDLAAKLEKLLTLPPAEFTAMKMASLRLIQIHDIDRTLDTFECLYRGLPVADALAEPDLGEVAEEGEVAGEDATAGR

SEQ ID NO: 9037 - protein, 378 aa, Deinococcus irradiatisoli
MRIGFVTTTYLPSRNGVATSTALFAQGLRELGHEVNIYAPNHPARPPAEPGVYRLPSTMMGAPADYPILLWPNPAVVAGLPLRGTDIFHTMHPFLPGMLARLWGRRFQAPVVFTAHTQYEQYLHYAPLMPRRMSRGLTRAHVATFARSVDQVLVPGRAMQEMLRGYGFMGRVAQMPNPVNLASFQAADTPQVRAAVRARYGVDHSAPLVISLGRLAAEKNLDLMLRAFGQARASRPELRLLVVGDGPARSALEARNTPGAVFTGAVPYAEVPHMLAAADVFLTASTSEVLPMSMIEALAAGTPLVAARSPAAEDLIRGGNGLIREAREDALAAGLLEVLAPAALPERRAAARTSAEQYDLRVRASALARVYEGLLVRR

SEQ ID NO: 9038 - protein, 377 aa, Rhodococcus sp.
MSALRIALIASSRYPVNQPFAGGLEAHVWHLAAALRKAGHDVTLFAGHGSDPQLACELIDARPAPISTAARTDISMPAEYFMQEHHAYLDLMLRLARDYAESFDIIHNHSLHYLPVAMASTLSAPVLTTLHTPPTPWLESAIAAGGSPGRFAAVSRFTADSWKQAAGDVDVVHNGVDTDQWSQGPGGHRLIWFGRIVPEKGAHHAIAAARESGMPLVLAGPISDHTYFRERIEPQLGDSVRYLGHLVTDDLVAAVGMSAVALVTPHWDEPYGLVVAEALACGTPVVAYRRGGIPEILTPDCGRLVPADDVAALSVAIGEAKQLARPHARARAVNHCSERRMVDRYVALYNEMYSAPTISGASTAETVPTATTRRVGR

SEQ ID NO: 9039 - protein, 382 aa, Deinococcus sp.
MRVGIVTATYLPSRNGVATSTALFARGLRDLGHEVRIFAPRHPQMPPREDGVYRLNSSFAGARALGAPADYPVMLAPGPLLTSRLPLRDLDVLHTMHPFLAGQLALRWSRLSGAPVVYTAHTQYDQYLHYAPMPKRVGRAVLRPHVSAFARRVDAVLAPGRAMVDMLREYGFAGRVDLMPNPVDLASFRAAGGAAFRTEFGVGPETPLVMYLGRLAPEKNLDVMLRAFTRARASRPELQLLVVGDGPSRAPLQAQAPEGVTFTGPVAYARVPEALAAADAFITASTSEVLPMSMIEALAAGAPLVAAQSPAALDLIEEGVNGTVRPPTPEALADGLLDTLHPDRLPALQEGARLSAARYDLPMRAAALAAVYERARQERPRR

SEQ ID NO: 9040 - protein, 667 aa, Amycolatopsis sp.
MLTLAIGLAAAGACCFAGTVHLQHRAVRGAATGPTLRLSGIRAILRTPGWYAGIGLAGLGAALHVLALTMAPLAVVQPIGVLTLVLTVLLARTPPTRTVLAALAMSVAGLAGFVALAATATNAALPAPALGTAQWALLAAAGLAAAARYARGRARSLLSALGTAVLFGFTSALIRAAAVAPLAGGPAVAVVAEAVVATLAGAWLLHQAYASGPAPIVAGATTVADPLSAVLIGVFAYGELAPGQLAGLAVPGFVAVAGLVLLARELPAPAAPARRTHRDGPLRIAITADTFPPDVNGAANFAYRLASGLAARGHDVHVLCPSPSVETFTETTAGVTVHRLGSVRTPFHPTFRICPPWRTARAVPALLAGIDPDVVHTQAHFLVGRSAVRAATAAGVPVVATNHFMPENLLGYGPLPRWTHRPLARLAWRDLVRVFDRATVCTTPTPRAAGLLERNGLNRPVLAISCGVDRAHYAGPAAEPAGRPAVLFVGRLDAEKNVHELLEAAVALPPDVRVELVGDGSERPRLEALAARLGIAERVTFHGFVPDEELVRAYRRCAVFCMPGTAELQSLVTMEAMAAGKPVVAADAMALPHLVRPGRNGWLHRPGDVADLAARLTAVLADEPARRAMGQASLELIAAHDLESTVDTFEGVYLDVARRPAPVALRR

SEQ ID NO: 9041 - protein, 367 aa, Halorussus rarus
MEQVAAFTDTYLPTVNGVTYTIASWRKRWERAGGRMDVVYPKADGHRPTDGEHPVGSLPFPFYDGFRLGTPKIPRAVRDAEVVHAHTPFGLGLGGLRLARDQDVPLVASYHTPTSEYASYVSPTDTVASVVGRISESYERWFFGRADAVLAPSAATRDHLIEEVGVDTTVEVVPNGVDTERFRPVDPDEFLARHDLDGDRPLVGYTGRHGYEKRLSELVEAAAEMDVTVVFGGDGPARDDLEAQAADLGADARFLGFLDREEMAAFYSALDAFAFPSPVETQGLVALEANACGTPVVGANAGALANTIDDGETGYHYESGDVADFRAAVRRTLTEREALRETCLARRDEVGVERAVDRLRDVYDRIR

SEQ ID NO: 9042 - protein, 346 aa, Unknown
  Description of Unknown: Methylobacterium sp. V23 sequence
MIRVAQVAPNIFPVPPRHHGGTERVIHDLSTALVDLGVEVTLFAPSDSATGLPRIGDQPSLAALEQRHGRVAPGVPAALDALQLEALRSRLDQFDIVHCHGEFAHAALLGARRRHSLTTVHWRVDELDRELFFAGFPDLPVAAISAAQAAGIPPANRAGIVHHGLARDRYALSTQPGPHVAFVGRMTDQKRPDTAIRVARAAGLPIRLGGTIDVGNPDYFEHRVRPLLGEDAAYLGPVDDARKADLLGSARALLFPIDWPEPFGLVMIEAMACGTPVVAWNRGSVPEIVEDGVTGFIVASEADAVAALARIGELDRTRIRRRFEARFTAERMAADYLALYRRLLAA

SEQ ID NO: 9043 - protein, 384 aa, Deinococcus marmoris
MKIGIITATYLPSRNGVATSTALFVRGLRERGHEVRVFAPRHPLMPAREDGVYRLNSSFLGARALGAPADYPVLLAPGPLLTSRLPLRDLDVLHTMHPFLAGGLALKWSRLSGAPVVFTAHTQYDEYLHYTPMPPRLGRAMLRPHVSAFARRVDAVLAPGRAMVQMLHGYGYSGHVELFPNPVDLAAFQAADGSAFRAEHHIPLDAPLVMYLGRLAPEKNLEVMIRAFDQARASRPELRLLVVGDGPSRLSAARDAPEGVRFTGPVPYARVPEALAAADAFLTASTSEVLPMSMIEALAAGAPLVAAHSPAALDLIGEGINGTVREATPQALADGLLFALHPNRLGALQAGARASAARYDLPQRAQALEEVYERVRAGHRRQKA

SEQ ID NO: 9044 - protein, 409 aa, Arthrobacter sp.
MSYPADFKPLTILIAADTYPPNVNGAAQFGYRLAKGMAGRGHAVHVLAPRPSNGPSVTEPDGDWSVHRLRSHSVPTHDYWRICLPWEIKRDISLLFDRVRPDVVHIQCHYMVGQYALYEAVKRGIRVVATNHFMPENINPFLPFPEWFKRIVAKNSWRDMGKVMGRAAAVTTPTPLAAKAMHDHAFLREVLPVSNGIDAAAYEVRPGEVIEPNEHPTVLFVGRLAEEKHIDVLIDAVARTPEHLEVHLEIVGGGEVKPALQAQAARLGISDRVRFRGLIDDEELRRSYIRASLFCQPGTAELQSLVTLEAMSASTPVLLANAMALPHLVSDGENGYLFEPGDADQLGKRITEILSLSREEQQAMGAVSRAMVGKHDINATLETFEGLYYGTLSSQPPAPREADLAGRIQ

SEQ ID NO: 9045 - protein, 673 aa, Amycolatopsis vastitatis
MLTLAIGLAAAGACCFAATVHLQHRAVRGATTGPELGLSGIRTILRTPGWYAGIGLAGLGAALHVLALTMAPLAVVQPIGVLTLVLTVLLARTALTRAVLAALAMSVTGVAGFVALSAMTTNPALPAPGLGTAQWAVLAAAGLAVAARFARGRARCLLLALATAVLFGFTSALVRAAAVAPLTGATAAMVIAEAVAATLAGAWLLHQAYACGPAPVVAGATTTADPLSAVLIGVFAYGEMTPGQLAGIAVPGVVAVAGLVLLARELPAPAEPASVGRPRREGPLRIAITADTYPPDVNGAANFASRLASGLAARGNEVHVVCPSPTGETFTETTGGVTVHRIGSVRTPFHPTFRICPPWRTAKAVPALLDGIDPDVVHTQAHFLIGRSAVRAATAARNIPVVATNHFMPENLLGYGPLPRWTHRPLARLAWHDLVRVFGRATVCTTPTPRAAGLLERNGLNRPVMAISCGIDRAHYAGPPTGAADAPAVLFVGRLDAEKNVHELLEAAVMLPPHVRVELVGDGSERARLEALATRLGIAERVTFHGFVPDEDLVRAYRRCAVFCMPGTAELQSLVTMEAMAAGKPVVAADAMALPHLVHPGRNGWLYPPGDAPELARLLTAVLTDERARTAMGEASLDLIGAHDLQSTLDQFEGVYADIAVHPVIPALSSGVA

SEQ ID NO: 9046 - protein, 644 aa, Amycolatopsis sacchari
MIVLAILLAVVAASCFAASVSLQHGAVRETGHGLSPRLMRSRRWLAGTALGATGAGLHVVALALAPLAVVQPIGVLSLVLTVVFSSRARLSAVLAVCVGTAGFVLVAATSTAASADVDPVGVQVPVLGALVLAGLAVAIRGRLRCLLLATAAAVLFGLGSALIRAATQDFALWPAAESAVLILLGGWLVHRAYDSGSPAVVVGATTVVDPITGVAVGLWLYGESAVLAPGQAVALAAFAALSVTGVLVLAKETPPQKGTRMPHGDGLKILIGADTFPPDINGAANFAGRLAQGLAGRGHDVHVVSPATAVPIGARGITRHPVSSVRTPFHPTFRVSPPWRATREAEAVLRRVRPDVVHVQSHFPVGRAVLRAARRQGIPVVATNHFMPENLLGYVPVPRALRGPVVRWAWRDLVRVFGAAQVVTAPTPRAVDLLTTHGMPGSPLAISCGIDLAHYPPHETAGKTVLFVGRLDAEKNVDELIRAVAVLPDVRAEIVGDGGCRLALTALARELGVADRVRFRGFVSDAELAHAYREADLFCMPGTAELQSLATMEAMAAGLPVVAADAVALPHLVRDGVTGFRYPPGDVPRLAAAIGEVLGSPATATAMGRAGRELVSRHEIGHTLDAFEAAYRSCWAEEPLPAAG

SEQ ID NO: 9047 - protein, 1103 aa, Copidosoma floridanum
MRTRKLLLLLLVPTLLFADHCSCYRILGIYPFVGKSHYIMMNQLFKGMARKGHQVDVITPFPQTENVPNYTQIFQFPDKTAEIIGHLNYDIIKGFSRTGNLSSVLDIGYKLCEYMGMPEFLNLARHPPKDPPYDVVITQVFNSNCFMVLGHLWNVPVVLVSTSALYPHVHDMIGNPENVAISPNNFSPVPPGAGGLWWRLYNAYFFYTVKSAFVFHSRNQNELLHRYFGPRVPDIRQLERSASLLLVNTYFPVNGVKPTTTGLVEVGGLHIQNDGPEMTDDLKRWLDESKDGVVYFSLGSILRIEIFPEETVAVIFDSLGRLSPTRVLMRVANPESLSVKLPPNFRTLPWMPQEKILQHPSVRVFVTHGGLLGTQESVFYGVPMLCLPVLADQWTNTQNYVQKKVAVSADIMSLTQETRETFDGAVNEVLGNPVYRDNVRELSRLFRDRSLSPMDTAAFWIEFVVRNGKDVLRSPAMDLTWWQLDLLDVLAVTTAGLSLILFVAVFTIKTLLRCLLGKSRTSCVSKRKKDTDVAVVPREFRVIVGLTVVDDSSWLTLPIDLDCTPCSKSVPCIVKINMNFSTVVVLLVCLLCTCDAYRILAAFPFHGRSHTIVLQETAKALVRKGHQVDVISHYPLEKPTRNYNDIVKLRSSEEYASIDYKTMMSMDEEDKWIYDILKGICDHLGNPEVQKLVKEQQKHRTYDLLLVHYLSGYQCFPAIGHLLDIPVVGVVTTSLYPWMHGFVGDPLNLWLHPSNLRPWKNEDLTFWGKLYNVLVTHRDISEHYKNAGFQQRYIDRYLGKGLPDYRQLERRTAMILTNSHYTYHGIKPKAPAVVEIGGIHINNDTTVSMDSSLKSFLDDSKDGFVYFSFGSMAVVETMPKDLLDRFYGVFGKIAPVRVVMRAPNPRALPKPLPGNTLVRSWLPQQQIFLENFFSEHPNIRAFVTHGGSLGTQEALHYAVPMICVPLFAEQHLNCDILANKRVARKLELRSARLSDYESVFQDVLSNYQTYKTTTARCSRLYRDRPRSPADELVYWVEYVIRHGRNALRSPAVDLTWWQVDLLDVYAFLATSLLLVSSLALFALRKLFVVFLRPKGTANKEKRH

SEQ ID NO: 9048 - protein, 235 aa, Ancylostoma duodenale
LSTDLVSENVHLFKWLPQTDLLNHPKTKAFITHAGYNSVQEAIHAGIPMVCLALFGDQPKNAKVTEKLGISRNLKKSELTAETIAAAIREVLENERYDKNAKKLARMVRNKPVSPKDLLIRWTEFLAEFKTLENLTPAGNKLNWIQYHSIDVLSTDSLGKSIRLTLFNPKKNTMKQCSRRSLSTSNQATLIDLALLTVEKDNCEHVARNVFKIFFDIVLIKISAWVEYLQGRIHY

SEQ ID NO: 9049 - protein, 354 aa, Helobdella robusta
NTLILDWLPQNDVLGHPSTKLFITHCGNNGIHEALYHGVPMLGFPLFAEQGENCRRMIAFEFGIKMDIFTFTEAELVENVLEILTNPKYKSSIKQMSKVFKDQPMAPLQKALFWMEHVIKHGGSHLRSSAIDLPLYQFLCFDTIAVLLLIITIVTFAVFQVSKFSLLYFYEVDHHFNSFIPNFPNHISVAGLTCSPAQNLPKNILDFINGRIVDGKDPGVILMSFGSFVDYMPNRLIEKFFKVFESLNETILVRYKIKQNDTQPKPTIPTNVMISDWLPQNDLLGHPSTKLFITHCGNNGQHEALYHGVPMLGFPLFAEQDENARKVIALQFGLIMDIMTFTEKELFGWFISVF

SEQ ID NO: 9050 - protein, 356 aa, Lottia gigantea
MVILDNTPIAQTLCVIPYKYNISFIYLGVNFEPFSAAIPFSTAFVPYKGLPLSDQMTFTERLGNAVSMYAPERPSIAVREIQKQAALHLIEWNFVLDYPVPTLPHVILIGQITPKHSRKESLSTELEDFLERSKHGVVLVSFGSIAPTTRNDVLDKMVSAFQETKYNYIIKGSFTNSTNKNLVVDWMPQKLLLTHPKIKLFITHCGANGLGEAISNGVPLLGFPLFAEQPGNAYRVQSRGFGLTMNLFEATKEEIVKGIDEVIDNPEYKMKVQRASEILKARDLNGLDQAIFWIEHVLKFGGEYLRSSGIDLPWYQYFLLDVIAFLLTCVSFMVSIIYFCLKCIFRRCVSRKLKGD

SEQ ID NO: 9051 - protein, 488 aa, Oryctolagus cuniculus
MACLLSAAQRASAGVLFVALWGTVLGDRLLVVPQDGSHWLSMQDIVEALGARGHEIVVLVPEVNLLLRESRFYTRRIYPVPFDQEEQSYRYRTFGEKHFTDRSWLSEPQTEYRKLMVVIDMYFINCQSLLRHGDTLDFLRAGKFDALFTDPFLPCGVILAEYLGLPSVYLFRGFPCSLEHGFGGSPNPVSYIPRCYTKFSDQMSFPQRVVNFLVSLLEVPLFYCLYSKYEDLAVELLKREVDLPTLFQKDPVWLLRYDFVFEYPRPVMPNMVLIGGINCKKPDVVSQVLWRYTGSRPSNLAKNTILVKWLPQNDLLGHPKTRAFITHSGSHGIYEGICNGVPMVMLPLFGDQMDNAKRIETRGAGVTLNVLEMTSDDLANALKTVINDKSYKENIMRLSSLHKDRPVEPLDLAVFWVEFVMRHKGAPHLRPAAHDLTWYQYHSLDVIGFLLAIVLTVAFVTFKCCAFAWGKCFGKKGRVKKAHKSKVH

SEQ ID NO: 9052 - protein, 521 aa, Fopius arisanus
MSGITSIFLSAFLLIINNENASALRVLAIYPFPGKSHSIGAEHLLEEMTHRGHTVDVVSHFPREKPIPNYRDISLRGLAPVFANSVTYDKIRQYNFIHPREFVELAGTGVCDLLGQPVLQELMKTPKGTYDVVIVHLFLAHCFIGFGEKLNAPVVGVVTSKLPDWMFDAFANPLNPSYMPSFFSSSTQRMTFWERLRNTVVTNRFRLQLCYYMEAESQQVERYFSRKISSLDELYKDVALVLVNEHFSVNDIKPATPDIIDVGGLHIYNNTQQLTTELRDWLDESTEGCVYFTFGSTVNFESFPEEVLRIFYRSFERIAPVRVLMRGDPEFHSKDLSKNVKIVPWAPQIAVLKHKNVKAFITHGGLLGTQEAIAYKVPLIGIPLFADQYTNLRNYANRGFAVVLELKALTEDSLTDAIITVLRDPTYSENIARVSELFWDRPMNPLDTAIYWIEYAAKRGPVLKSPASELSWWKFHLLDVYGFMLMCALTILCAIIKLITLLRSRASRVLPKKVPKSKKHN

SEQ ID NO: 9053 - protein, 309 aa, Unknown
  Description of Unknown: Oryza sativa Japonica Group sequence
MVMGYKCFTLKSSPELSMAGVDATAAGGDEAGETLHVVLFPFLAFGHINPFAQLARSLLAVGGVRVTFLSAAANVAHVETRDHAACGRPSPSWHCICRAFRGSPRAQRARRRSTRTAPSCSSSPSTARGRRWRRCSRGSARTSCSSTSSRRGSPTLPGVSASGRRGSRSSPRSPARTSWPTGAASTARARPPRSSRRRPRGSRRRRRSPRCRPTRPPTSPTFSPASTACRARMTAPSPATTPATRSSSGPATRWKAPTSTTSRRSMASRCSPRGHWCRSHREASWRRGSRRGSPPSRTRPSSSPWTNIE

SEQ ID NO: 9054 - protein, 520 aa, Halyomorpha halys
MNYILAIILVATSIVALEGAKILIALPIPWYSHTMTFMPAFKELAKRGHQVTMVSPFPQKKPLANWTDLPVDPKPMLAVMDHHLADRVTSGHNVHTFYISAWDFFTNIMEAAFQDPTLQEVIKSENLDYDLVITEPFYGLEPLVALGHKLNVPVVAIHPLSLTPWGSYLTGNEMSFHLMPNIRTVYTNEMTFFQRLNNVLVNLIEFSVAYFHYLPTKVKQMEKYMVYPGSVNRPSMLDMLQNVSLTLIDYHPSILYAEPLQPNSIPVGGLSLSHVDELPKDLKDVLDNAKNGAVFLSFGSLFRGKALESRVLSVLFETFSQLDQVLLMRWHTEDVPNKPKNVIIKTWMPQPSILAHPNLKLFITHAGLHGITEGAYFGVPLVCMPLFSDQEYDSRFVEKAGFGTVLLLKDFNKETLLANINEVLKNPKYKEVAMERSKIIKDKPQTALELAVYWVEYVIRHKGASHLKPGRQQLSLYQTLGLDIITFVLFLIAILILVTCKTISFLKLQICKNSVKTKKE

SEQ ID NO: 9055 - protein, 311 aa, Trichomalopsis sarcophagae
MDVKILLLLAIVGNTEICKGCRILALYPLPKQSHFMMINQLLKGLALKGHQVDLITVNTLPKSHSNYMQIMKLPDNANPIFSRYENIKNLHYNFSMMSWMGYLRCQKMEHPEFLNLARNPPKAPPYDVIIVQDAKPITSEAFWSRGTDYTRFTDSYTKKNVPDNVLIMSWIPQEKVLQHPNVKVFIMHAGLLGTQESIYYRVPMLCVPLAFDQWSNANNYVSKKIAVKVDLASVTQTKIDEALNEMLTNPIYRENIRKYSQLFRDRPQTAIDTANYWIEYVKRNGKNSLRSATMDFTWWQIYLLDVPDRNH

SEQ ID NO: 9056 - protein, 524 aa, Amyelois transitella
MFYKQHSLFLLSFAIFCEAANILYVIPFSSKSHYIFLKPIGLELARRGHNVTVITSYKEAKPPKTYHEVMVDNKSIWEIIGGERPNVFTMVGLSAEEFHDKILWSGGLAMTEVALNSKEVQELLKNDHKFDLVISEQFFQEAMYVLAHKYDAPLALVTTYGNCMRHNIITRNPLQLSTVISEFLDIREPTSFWGRLRNMYFALYEFVWWKYWYLEKQEALVKKYVPHLKEPVPSLYDLQKDTALMLYNSHFSFDNAAAYGPNIVEIGGVHLSKSDEVLPKDLQEILDGAKHGVVYVNFGSNVKSSELPLEKKNTFLNIFRELKQLVIWKWEDETLDDKPKNLIIRKWLPQKEILSHPNIKVFISHGGLIGTQEAIFHGIPIIGIPIYADQFNNLLQAQEIGFGQILEFKDINEENLRNKLNNVLKDDKYGVKAKEISARFKDRPMSALDTAVYWLEYVIRNKGATYMKNPALKLNRIASTMLDVYAFIFIVFTTIFFILTKTLNIISAALSTNVSKNKRKQKRN

SEQ ID NO: 9057 - protein, 524 aa, Sipha flava
MYYQILTVMLLALGNHVQPTDGANILAFFPLPIYSHFSGFNPLFLELADRGHRVTVVSPFQPKGTVPSTYKHVSITNVRIPRRTNLLDIPKSYRITNMINVRKTMMEMVRRTLVLKDTQAFLNDTRNAFDLVLSECWYSDAFLAVGHRYSAPVMCLSPMMPSATLCAALGSPNNPSFVPSFWLHYSDAMRFSERLFNAVITAAEMLLSGVVYRDVDQEMADALFTYPGHEHRPPMDELRGAVAVTLINSHHSVSYPRPYPPGFVSVAGMHMRPKKESAVKVEPEFKMLLDSAIDGIIYFSFGSNIKMSDLPEHYVRMFVESFRKLPQKVLWKWENGSIDNAPDNVYVASWFPQQYILSHENCKLFITHGGYHSLVEALHAGVPLIGFPFFTDQYYNMRFVVENGFGIEIMLNDLRENVLDDAIGSIMFDSSYKEHARRASEIFLDLPSSALDTAVYWVEYVIRNGPDFKLSLQSHRLNWYQYFLLDVIVSIIVILVSTAFFFYALIKFICKRYFNSSFKIEKLN

SEQ ID NO: 9058 - protein, 238 aa, Helianthus annuus
MEGICLKDFPIAWTTDPMDEVLKFSIQLNQRSHRVSHHIFHIFEVLEGSVIKALSSMYDHVYTIGPSQLLLDQIPETGSYSFPGYSLLKEEAECFEWLESKEPNSVIYVNFGSTTVMSLKDLLYCELVFAGKGSELSVGWRVFESLWVGSTIESLSAGVPMICWPHRLDQVTNCRYICEEWGVGVKMQGSKVRRDEVTRLVQELMGEGGSRNKEQGCRVEGKGARCRRSLRFVFVERG

SEQ ID NO: 9059 - protein, 448 aa, Choristoneura fumiferana
MFVQLILVVLAPCFVCSSNILCVFPTPALSHQSVFAAYVDKLVIAGHNVTVITPMPRGVQHVTEIDCSTKNVFVNLVKNSTSLKKRGLVADELTVTAENYTPIIDMVVEQIKSYNVTNLLKNKDNNFDLVVCEAYLDIILIFGHLYRTPIIKFSSGYGTNENFKTMNADVKYNSVVYPNLWRSNFSNENIEQALNTEWQKLKQIQNIRLQKLFGDRTSTISVMQQSVKLLFVNVPHVFDSDRPVGENVQYLGGIHLKKPRPVRDIKLIEFLNQKTNIIYVSFGSILDAAAMDESLLTEFVKVFTKFNVLWKIDNVVSSKFNLSDNILTRNWFPQRDILNHPNVKLFITQGGVQSVDEAVDSEIPLICIPMVGDQFVNCRRIDQLNIGVVVNILKLESENLYKKINDVMNDTTIVDKIHALKKNIHDAPMKPLHKALWYTQKVLRNNKY

SEQ ID NO: 9060 - protein, 293 aa, Helianthus annuus
MDAKPIVGRKKPHVVFIPYPAQSHIKCMLKLARLLHHRGLEITFINTEWNHKRLFKYGGSSGLDGILGFRFKTVPDGLPSSSADGTEPTQTVEELGLYLLTNFLDPFLDLVAGLETPPTCIICDGTMTFTNIIDATEKLKIPIFLYWTMAASGFMAFYMAKILLEKGILPLKDESYLTNGYTDTLLEVPGMQKVRLRDLPEHLLATKLDDPSFNWYVDSARRADKVPHVIIHTFDELEAPLIKEIKSRFPHTYTVGPLQLLVNQITENETKKTNFNGYSLWKEEPECYNSNVF

SEQ ID NO: 9061 - protein, 379 aa, Unknown
  Description of Unknown: Oryza sativa Japonica Group sequence
MAKGHVLVLPMPCQGHVIPFMELSHRLADEGFEVTFVNTEVDHALVVAALPPGGAAELRQRRIHLAAIPDGLAGDEDRKDLNKLIDAYSRQANRGWRPQREGVAGAAGDAAAGAGDAAAAHVAAVVEQLRRGGRAAHHLRPRLPEQQVQRRPRRDDRLQLLPRGRARRLQALPGPPPHRPARRRPRAPPSRRPLLAGGRRLPGLARRAARRLRRVRGLRQPGHLRREAVPGARRGAGAHRPAVPLGCPAGLHPWPEHGVAGRLPAPRRRQGRDRRVVLAAARAGARRRGVLRVALWVELDAGRGAQRRAVPVLAVLLRPVPRPELHHRRVAHRARRGGRRGGRRRDEGRGEEQGGAGRRRRRDQGEGAAAQGHGARLRQ

SEQ ID NO: 9062 - protein, 407 aa, Fukomys damarensis
MEGSHWLNVKIIIDELIKKEHNVTVLVASGALFITPSSHPSLTFEVYKVSFEKEKIEKVIILTWLENRPSPLTIWRFYQEMTKVIKDFHMVSREICDGALKNEKLMENLKKGKFEVLLSDPVFPCVTMCANFLHPNFIFSGKPTTLCETMSKAEIWLMRTYWDFEFPRPFLPNFEFVGGLHCKPAKPLPKEMEEFVQSSGEDGVVVFSLGSMVQNLTEEKANLIALGLAQIPQKVSATSGPGHPKTKAFITHGGTNGIYEAIYHGIPMVGVPMFADQPDNIAHMKAKGAAVEVNMNTMTSADLINALRTVITDPSYKENAMRLKRIHHDQPVKPLDRAVFWIEFVMRHKGAKHLRVAAHDLSWFQYHSLDVIGFLLACVASVVFLVTKCFLFTYQKFIKSGKRIKKE

SEQ ID NO: 9063 - protein, 856 aa, Biomphalaria glabrata
MDVCDLGRDFAVGEFIASNIVTAVKESRKTLVVLTRNLLNSTWCNFEMQMANMESVHTGRPVLVFLIKESIPTAELTSDLLYHLNKNTISCKYVYVFNVVYVFNEVYVVSVVYVVNVVYVVNVVYVVNMVYVVNVVYVVNMVYVVSVVYVVNVVYVVSVVYVVNVVYVVNVVYVVNVVYVVSVVYVVNVVYVVNVVYVVNVVYVANVVYVANVVYVASVVYVASVVYVVNVVYVVNVVYVVNLVYVVNLVYVVNVIYVVNVVYVVNVVYVVNVVYVVNVVYVVNVVYVVNVNSKMLSLTQLLIMASIVSLEFCGAKKVVMIPPLSKSYLIYHANIGQALIELGHNVSICVPDYLANKGLVPHKKINIIKYGEYLGDVEALVYEKTQLIEKFWAGGVETVGSLIPIVNFCKELLEQILSDETFITSLRDLKPDFFIIENFMFTRNILVLPYKLDVPFGLIGTYHDYFLSRTPFSPAADQLFFDDGGDRKSFLQRVQATILSAAFTVYDIFSDSDVVSRYAPEKPSISIRDIALKAEIFITEIDHILDYPRTSLPNTKLVGGSSVSEAKPLSGDMKHFVDKSSNGIVVVSFGSGNVYIPDQIRSKMANAFLKLNLNVIWKINGTFEQQDKILASNWIPQNDLLGHPKTKVFVSHCGKNGQYEALYHGVPILCLPMYGDQFYNSKRIAVKEFGHYADIREITSEKFSALIQEIADDPKYRNNIKKASKLFKELYKVPSKEAAYWFDHVMKYGGSYMRSTGQQMPLYQYLLLDVMAFLFEVSWTRCLELHSNEYLINISLSSEQGDLGATSKSQRLLDAHPTSFYFRISKTKRVTEIQSQVVIQLQSLAVFPSPEDLCSQ

SEQ ID NO: 9064 - protein, 562 aa, Dinoponera quadriceps
MTRDISRRRIYLSTVYLLTVVVVVFSSSSVCSAAVYDGDTFVNMTKSSLKILGIFGHFGKSHFDVFKPLMEELARRGHRVTVVSHFPRSEDAKAKEPLPTYKDISIYDPDHGVYLDVVDIHMIKHNILQPAYELMFLSFMADMACKTGLRHPAVREFLRSDEEFDLIIIETFNTDCFLGFVHKFKAPYITISTHQIMPWVNSDMGNEDNPSYIPITLLGLNKPMNFLSRLYNMLSLSIAKVAYNCWFRFRDQSVANEAFGPDLPSLKEIARQTQALLVNTHNSLHGSVPKLPNIVEIGGIHIPTQVKPLPEDIAEFLDNAHQGVLYFNLGSMIKMSTIPREKLDVLLNVLGSIPRKVLLKWENEVLPRKLDNVMVKKWIPQFDVLNHPNVKCYLGHGGLLGLSESIYVGVPMILMPMFGDQFHNVAAAKNRGIAEMVAFNNLDEHSLRLALDKVFNDTSYSENVQRLSKAYRDRPATPLETAVWWTEYIARGNGGPYLHSYGADLAWYQYHHIDVVLVLIIVVALFVYILFRLIKLLSCLLHAVKEVYISATKPTNKWKKEN

SEQ ID NO: 9065 - protein, 510 aa, Biomphalaria glabrata
MLSLNQLLIMASIVSLEFCGAKNVVMIPPLSKSYLIYHAKIGQALIELGHNVSICVPDYLANKGLVPHKKINIIKYGEYLGDVEALVYEKTQLIEKFWAGGVETVGSLIPIVNFCKGLLEQILSDETFIASLRDLKPDFFIIENFMFTRNILVLPYKLDVPFGLIGTYHDYFLSRTPFSPAADQFFFDDGSDRKSFLQRVQATILSAAFTVYDMFSDGDVVSRYAPEKPDISIREIALKAEIFITEIDHILDYPRTSLPNTKLVGGSSVSEAKPLSGEIKHFVDKSPNGIVVVSFGSGNVYIPDQIRSKMANAFLKLNLNVIWKINGTFEQQDKILASNWIPQNDLLGHPKTKVFVSHCGKNGQYEALYHGVPILCLPMYGDQFYNSKRIAVKEFGHYADIREITSEKFSALIQEIADDPKYRNNIQKASKLFKELYKVPSKEAAYWFDHVMKYGGSYMRSSGQQMPLYQYLLLDVMAFLFGIVIVFLVVVSIIFRLCWKLLTKYKVKTD

SEQ ID NO: 9066 - protein, 509 aa, Octopus bimaculoides
MAALWWKMSSSIVWLFLITANKIAEADNILFLSWPLFSHAQGMSYVAKELSKYSHTCYYPMTEKLAERFKSFEGIKIIPMKNNPRIAYFEKLSTQQFLKNSNITWKMMSQEIHDICDSFLLDQEWFQSLKAVNATIAVVDYVFMSNCLTIIPYKLSIPYVFQGISAEHQAVTRIPWHASVFPNMLTLYTDQMNFYERLVNHILTVPSYFLPLLGNPAKSVKAYAPEKPEISFEKLMNQAALYLHESDVLLEFASPSLPNVKHIGGPATRPAAPLKGDLHKFVEKSNHGIIVVSFGSFLDTFPEGHLEKMEIAFKEIKYDVIWKHPAPKSIASNIFLTKWLPQNDLLGHPKTKLFITHCGNNGQFEALYHGVPMLGFPVFADQFHNGRRIQVKGYGISMDMFNYTKDELVSTINELIVNPKYKNKIKKASEIFRSRPESPAARGARYIDHVIKYGGDYLRSSCQTMPLYQFLMLDIYAVFLAVFIVSLCLVKFVIRKCYRCCCVKKKKMD

SEQ ID NO: 9067 - protein, 546 aa, Polistes dominula
MYLRWMNLCFYVYIVLCFICHETKSEFLDKSPEKKLKILGLFPHHGKSHFFVIQPIVEELARRGHEVTVISYFPRTNSSKVKEPLPNYKDISLVNENYVAAEDSVNLGKISHLPVVTLLKEVFFLSTRGKGSCENGLTNPGVLEFLHSNKKIDLIFIENFNTDCFLSFVHKYKVPFVGISTCQIMSWTNNHIGNPDDEANIPNVFTHFKTPMNFFDRTANLLWVHIQNIIYDLWYDYYHRGPAEKLFGSDLPRFADIAKHQSLLLTNTHWSLHGSRPLLPNIIEIGGVHLPSSVKPLPQDLAKFLDEAKEGVLYFCLGSMIKATTMPPARLQAIINVLRSIPRKIIWKWEDTNFTAKPDNVYISRWLPQYDILHHPNIKAYVGHAGLLGLTEAVHAEVPMILIPMYGDQYRNAAAAVHRGAAILLEYEELNEKIFRDALDEIFNNTRYRDNVKKLSKAFRDRPSSPLETAVWWIEYVGRGNGLAYIRSDAAEQPWYQRHLLDVILFLILLFLLIFYVIYRLIKFFIKRTNTKTEHVFDNKKWKKRD

SEQ ID NO: 9068 - protein, 487 aa, Bos mutus
MNMMSMKQLSFLMLLQLTCYFNSGNCGKVLVWPVEYSHWINIKTILDELVSRGHEVTVMTSSASILINTRKEFGIKFENFPVSLTKGDFEYIFKDLLEKWTYMEKDSFLSYFSAVQSLFWKYSDVSMKMCKEVVSNKKLITKLQESRFDVLLADAIGPCGELLAEILKVPLVYSLRFSPGFSIEKYSGGLSFPPSYVPVIMSELSDQMTFMERVKNMIYVLYFDFWFQTFNEKKWNQFYSEVLGRQTTLSETMGKAEMWLIRTYWDFQFPHPLLPNFEFVGGLHCKPAKPLPKVLWRYSGKKPDTLRPNTRLYDWIPQNDLLGHPKTKAFLTHGGTNGIYEAIYHGIPMVGIPLFADQPDNIAHMKAKGAAVSLDLETMSTRDLLNALNEVINNPSYKKNVMWLSSIQRDQPMKPLDRAVFWIEFVMRHKGAKHLRPAAHNLTWYQYHSLDVIGFLLACVATAAFVITKCYLFCYRKFLKTGKKKRE

SEQ ID NO: 9069 - protein, 504 aa, Biomphalaria glabrata
MICSVVALLELPDLFLEAKKIVMFPSPWRSYAIYHSIIAAALTEFGHDVWLCLPRQQSLEGLVRNERVRFITYEYEIDPFYKKLFAEELLKKDQDSVYDVFQPKHRHEIFLGQILEDTQFISNITNLKPDLFVLEMAKSSTNVVLIPYKYDIPFAFISTMRNPVKTRTPFNPILEPLIYLSVSDKMTFFQRVKLTLIYLTFLLCPSATYDKFVRQFVPEKPFLSINDIVLKAEIFLFETDHILDYHRPALPNTKFIGSSSARPSNSLTGQLKLFADESSHGFAVVSFGSVDIELGQRITDTMISAFEKIALNVVWKTNATIIRSRKILTRPWLPQNDLLGHPNAKVFISQCGKNGQYEALYHAVPMLCLPLHSDQFYNTERILVKGFGLGADLTSVTPEELANLINNVTYDPRYRSTIKKASNLFKELYKNSSKEAAFWFDHVMKYGGDYMRSFGQQMPLYQYLLIDVIAFIMVIFIVVIHVMYTTIRLIYYMFKNNAWKLKSE

SEQ ID NO: 9070 - protein, 389 aa, Lottia gigantea
MLNDSMLLSDIKEQNFDLMIVDSTPIAAMLVLIPYKFNVPFILCGAYYDPLALRVPFSPAVTPFEILENTDRMTFYQRFSSAMWHLHITYYSPFSYANAAGRYVPEKPNLCIVDIIKKTELVLYEYSILLKYPQPTMPNIVLLGDVTPSSDTQIPNNFKKFLDRSKNGVVLVSFGSLASAGDKPVFKKLVSAFKRTKYNYIIKGEFTQSDDQILAENWIPQSSLLKHANIKLFITHCGANGIREAIIGGVPMLGFPLFAEQPGNAFKMQSRGFGIKMDLYWDNEDDIVKSINEIIENPQYKNTVKRASEFMNAQKGNATLEAVFWIETILKFGGEYLRSAGVDIPLYQYLLLDVIFVLICIIIVVILIMYLICKCICNRMCSKTKTKRE

SEQ ID NO: 9071 - protein, 524 aa, Apis mellifera
MKYRNGIIIFALCFINIIDQLNGARILGVLHIPIYSHHVPFQPLWKELIKRGHEIVLITSKPISTINSTNFKQIKYNVDLKFIQSNYIELRMNRKSFISFMKDDVYIMLLHITNKIFEHPEVKKLYAPDSKEKFDLIMIQMLSAPGLYAFAERFNAPVIGLSAFRLMAIENYMLGNIVLPSHENTWEMESNTGSNLSFWQRLNNFYVMWNFIYTMNYRCFPAHQQLAEKYFGPSVSSIKDIMKNTSLVFVNENQIISYARPELPNIIKFHSIHVADHSEPLPQDLKTFVDNATNGFIYFSMGHTMNFSIISNSIQEIFYDVFEKLPYKVVWKYDKEPLRKIKNAYITKWLPQKSVLAHPNIKLYIYQGGLQSTQEAIYHEVPVLGIPIFSDQENQVKIAVNHGIAKDLNIETLTRDKLESAIREMINNKQYKKNIINLRKLMNDLPYDSLNILIWWTEYVIRHKGAPYFRSNLAWQSWYQYCDNDIIVFLSFTVFLIAYTIIKIIRKLISYMHKLSIDQKKKTN

SEQ ID NO: 9072 - protein, 222 aa, Cephalotus follicularis
LDSFDGLPSFRFETIPDGLPPSDDNTTQDIPSLCASVIKNCLAPFKHLLLKLNDASTSSNVPTVTCIVSDSCMGFTVDAAEEFGVPNVSFCIFSACTLICFLHYRQLVESNYTAIKGESNLTNGSLDSVIDFIPGIEGITMRYIPTFLRMTDPDDIVLKFIAIEVERMKRASGTIIHTYDALEHDVLCALSSMLPQVYSIGPLSLLANQIQDDDLNLLGSNT

SEQ ID NO: 9073 - protein, 232 aa, Helianthus annuus
MRTIPSSMGSTQENQPHVVCVPLPAQGHINPMLKLAKLLHSKGFFITYVNSEFNHQRLLRSVGSDALHDLPSFHFETISDGLPPPENPDATQDVSSTLNSLHETGLGPFKSVLSKVSTLYSPVTCIVADFLMGFTLPAAEELGIPAVLFWTSGAGSLICYDQYPNLIQKGLMPLKDFLHVQILKARRTWSMTRFGMKTRREGAQKMKMIELPLAIINTTRISLHKDKVFSRA

SEQ ID NO: 9074 - protein, 529 aa, Dufourea novaeangliae
MKSITSVVFLVLCIFAAVQQLQSAKILAIIPTPSYSHQIPYRQLWLELHKRGHEIVLVTANPIPGMNATTFRQIDIGTSYGIIRQMDFVKFRFEGLDWLAFEENYLFDFSDLMANEVLNHTDMKRLYEPNSNEEFDVVMAEMLLVPSIYAFAHRFNAPMIGLSSLGLLAFNEHVLGGIVLPSHEYTWEMEANVGLQQPFWKRLWNYVSLWRSIYKVHHNLLPRQQRIVETYFGPSVPPMLDILKNISVIFINQADPITPAKPKLANMITFTSFHVSDNLTPLPEDLKRFMDNAKEGFIYFSLGSNAMSSDLPKETLQVFKDVFSKLPYKIVWKFEKDMPGKPDNVFIGKWLPQQTILAHPNIKLFIYQGGVQSSEEAVHFTVPLLGFPVLADQDYQVLRMEALGVAKRLEITTVTRDELNSAIRELLSNKVYKERMIELKKKVNDNPYDMVSHLVWWTEYVIRYKGAPHLRSSLVDQPWYQRCDMDIVVFLTVLSVLIISNVTGIIAKLVVRSYKQYQVLSGTQKQKIS

SEQ ID NO: 9075 - protein, 444 aa, Eumeta japonica
MMKEFGKEVDFFTSQHRLWSIMNAYTEYILNAEELKRFIEEDNSKFDLVIAEEFFQQIFYVFSYKYRAPLILLSTFGVGHYMNEYMGNSMEISYVPHEFFAVSGDMTVFDRLKNLAYTLYDILARRYYSLAFQNELAKSVFKNLGEIPNLEELERNASLLLINAHYSTSIVRPYVPNIVEIGGIHMDAVKNLDEDLRRLLDEAKDGAVLFSFGSVMDLSRQPRESIAEVLAALGSIAQTVILKWNSDEPLPILYGNIHPYKWIPQNDVLAHPNLRAFVTHGGLHSAMEAIHHGVPTICVPFFGDQPLNCLKSAKMGWGIALEKKNLDQNVLRTALNEILHMKSYQNRARELSVVFKDRPIDVMNSTMFWIEYASLFAVGCFPSEEVKMSISHTLAPVRVGSVGLKPTKKVPLKMKWLDRLCYVVGRLYNFTESGRTTHVGADGA

SEQ ID NO: 9076 - protein, 521 aa, Halyomorpha halys
MKYTLPIILLVTSFLGLEGAKILIALPIPWYSHTMTFMPVFKELAKRGHQITMVSPFPQKKPLPNWTDLPLNITLMVAAMDHHLANKVTSGHNMYTFYPVGWNFFMRIMEVAFQDRTLQEVIKSENLDYDLVITEPFYGVEPLVALGHKLSVPVVAIHPLSFTPWGSYLSGNELSFHLMPNIRTTYTNEMTFFQRLNNVLVNLIEFSIAYFHYIPNKERQMEKYMVYPGSENRPPLLSMLRNVSLTLLDYHPSILYAEPLQPNTIPVGGLTLSHVDELPKDLKDILDNANNGAVFLSFGSLFRGKALESRVLSVLFETFSQLNLVLLMRWHTEDIPNKPKNVIIKTWMPQPSILAHPNLKLFITHAGLHGITEGAYFGVPLICMPLFSDQEYDSRFVEKAGFGTVLLLEDFNKENLLANINEVLKNPKYRNIAMERSKIIKDKPQSALESAVYWVEYIIRHKGADHLKPGRLQDFEINSFTCKRLVILVSPDYLNLNIDFFEISSTDWIYILKYISGNVTE

SEQ ID NO: 9077 - protein, 540 aa, Athalia rosae
MTSPAKLFCLTSCVVFLMSSWRSEAAVRNEKFKILGVFPHPGKSHYDVFAPLLEELAHRGHDLTVLSHFPRKEKLPNYKDISLVGETGIYLNVVELSMLNHGPFHAMYELAMLKTMADAGCASILEKPDVKKLINSDEKFDLVIVEAFNTDCPLGFVHKFKAPFIGISSSQIMPWTHHRLGNPSNPSYVPVILKQLAPDMSFWERVTNAVHLVAVRVAYDLFFMRQTQVLVEEAFGPGVPPLDEIAKNMSALLINSHFSLHGSVPTSKQVVEVGGLHIRGSKPLPKHIKDFLDSAEKEGVLLFSWGSMIKTSSMTKELLDMIVKVLANLKQKVIWKWESDLPNLPKNVMIQSWLPQYDILSHPNVKGFLTHGGLLGVSEGIDRGVPMLVVPMYGDQGLNAAAAAARGAAIILQLEDITEKTLSDGLNEILNNPRYRRDAKAVSEAYRDRPSSALETAVWWTEYVARGKGVPFLPSVATHLSFVQYYLLDVIAFLLLATSGVIFIIFFAIKALCGRKVGGSATTAGKSNGVKKSEIDKKRV

SEQ ID NO: 9078 - protein, 520 aa, Trichogramma pretiosum
MLINKLILLLVTFEVIGCCSAYRILGIYSLPIKSHFIMINQLFKGLIEKGHNVDLINTFPLNENNTSYKQIMTLPDHSVLTSKTLRIDEFVVNFNSNYSLMGLLGNAICKNIGHPELLKLAENPPKDPPYDIIILHMMNYHCYMILAHRWNIPVVLVSTTAMYPWMHDMIGNPENIAFSPNNMKTVPEGNGFWARLVNAYIFYRLKFSYLHQTQYQSDLLKKYYGPDAPNIRELEQSVSLVLMNTYFPINGVKPLTTGVVEVGGLHIKNDGLELDVDLKKWLDDSKDGVVYFSLGSMFRIETFPDHVLDIILESLRKLTPVKVLMRIAKLEELTKKLPSNIHTLPWIPQEKVLNHPNVKAFITHGGLLGTQEAVFYGVPMICIPLLADQWTNAQNYVRLKVATVVDFRYMTQKEFDQAIDNILKTREYGENVKRLSKLFRDRPQSPLSTAIYWIEYVIRNGKNSLRSPAMDLKWWQISLLDIFFVTIIMPLVIFALFIIFFIRFIKRLISFKRSESKKRR

SEQ ID NO: 9079 - protein, 524 aa, Trichomalopsis sarcophagae
MSREREAEINNNGQEPLRSIVTVMDLRSIFLFLFLGLSVSDGYRILAIFPFDGKSHFGVLNSVVKDLASGGHQVDVMSNFPPKESFPNLTHIVTLPVAGAQSRIDYNLIFYPEKEANWLHDKKRRMCDFLGLPKVAELIRNPPTNPPYDLLLVHVLTGYQCLAAIGYKWNIPVVGVVTTTLYAQMHHIIGNPLNLALTTSHFGFYKKKLDFWDRVHNVVQTYRVISKFYGYAKDQDYYIKKHLGNDMPSYRQLEKNMALMFTNSHYTYHGVTPKTPGLIEIGGINIKNDTSELPADLKKFLDKSKDGFIYFSFGSLVVIETLPHEALERFYSAIRKISPVKVLMRVPHPDDMPKNMPDNVYKFSWLPQQTVFQHPEIKGFVTHGGAVSTQEAVYYGVPMICVPFFAEQFINCDILSHKNSSLTLDIYRNQRLTQDDYDHAFREIITNPTYKESVRKFSRVYRDRPLSPKETLLYWTEYVIRHGKNILKSPAVNLEWYQSDLLDVHAFLFTLMTKTSKKSSKKIN

SEQ ID NO: 9080 - protein, 211 aa, Helianthus annuus
MEKPHAIFIPYPAQGHINPMMKLAKLLHLKGFHISFVNTHYNHKRFLRSRGPSALDGLPDFRFYSIPDGLPPSDADSTQSSPDLCVSIPKHCLEPFCELITRLNDASDVPQVTCIVSDGAMSFTLKAAEKFGLPDVLFWTSSACGLLAYAHYRDLIQKGYIPLKGTTYCFCSRVMHACSFGRSLFNLFGKIENHVLESFYLRSLKIEYKYF

SEQ ID NO: 9081 - protein, 358 aa, Rhopalosiphum maidis
MVVLIVTVISVIITVTVISPADTANILAVFPHEGFSHHLVYLPYIQELANRKHNITFISNYPIEHPNINNLSIRGSIPLRNNKENISSFENKSMNEIMQSINIIWMFNKRGKVHEAMFTDIQKYIDEAENGVIYFCMGSLLRGETFSAEKRQMFLNVFNKIPQRILWKWEGELPGKPSNVMIRKWMPQRDILAHPNVKLFISHGGLLGTTEAVYEGVPILSMPMFGDQITNIKTLINKGSVEMMNYNDLNEDEIFIKITSMLTNPKYRLKAKELSEAFRDRPMSPLETAVYWTEYVIRHKGAPHLRSAAVGMPWFQYYLIDVFIVIFLSVTTFFVLLYCLVFKVLLRLLNRKSKEKKS

SEQ ID NO: 9082 - protein, 573 aa, Copidosoma floridanum
MNWSRKLVISFALLSLSVVSLSSGYRIFAMIPFKGRSHFKVLEQVVMALTEKGHQVDVISGYPRTEPFPNYTDVVKLQSTQVKVSVDYSELHSRNGIKEAVHSTCLELCDLLGHPEIARIVKNPPKDPPYDLVLTHFFAGYQCYTGVAHLWNVPLVGVVTTAMYPYNHRMIGSPLNLAIASKNLRSHNDKMSFWERLYNVLMTHWEIYTYDMRAYKQDALIKKYLGPDMPSYTELEKSVSLMLTNSHFSFHGVQPNNPAHIEIAGIHIQDDNTTTMSEDLKKILDDSKDGFIYFSFGSLMRLESFPEEVFGKFYSVFRRLAPLRVLVKSVDPKALPKGKPNNVFTFPWFPQEEVLKHPNIRGFITHGGGLGTQETVYYGVPVICVPLFADQHINCDIATNKKFGIKLDVVAAQQADFDRAFNEILNNPTYRESATKLSTVFRDRPLKPRDEAVFWIEYVIRHGKNVLRSRAVDLKWWQAELLDVYAFIAASVAVLLGCLVFFAQLLIGSFIRKMRKFSLSVNSRRSKKVPAMVDLIDDNATCAYRDIQKITEASGQLHCESKRREPEYTSHTR

SEQ ID NO: 9083 - protein, 350 aa, Sulfobacillus thermosulfidooxidans
MRILIASLPIGTGHDIAAKALAEACLKLGMEVEFSEHLVGKARIETGLYFWALKYIPRQYGYIFRWGDHSPLQWAKHRQRWMRIGQEILNHVYDLYEPDIILATHPFALNAWAGVKEIHSHLKLVGVLTDLSVHRFWYEPLADAYTVWLPEQVEDLARFGVKKEQVWQTGIPIRSSFHEPAWELPLYAKDPIVLLGGGLGMGPYYRILRKLAEADYPVVAVCGHNERLRWHLDQYSWPDVVTIVGYVEKMPLLLHHSRLVVGKPGGVTAAEVAQSHVPFILTHWIPGQEEANRDRLLLHDMAVRGDKDLLKWVRNILPEESPLRRKIIHHQELWARPHAASDIANRLLNL

SEQ ID NO: 9084 - protein, 389 aa, Syntrophobotulus glycolicus
MFEPRILIVSSKFGGGHYQAGEALAEGLRSMLPKDAQIRHCDYGSFFPKGTDFLMRTAYLKMVKNTPSIWGKIFKYTNTTHAENKYRNFVKGFRQKSFIHYIREMEPDIIVNTHFMSAGVLAELKRKGLIKVPLVTVVTDYVIHGMWIHPGIDLYIVGCRQVQEKLIEAGIKEESIMITGIPIRLEFEQDLDKEELRKKLGFDPNKTTILFMGGAYGPTSKATEIIKAINRLNPRLQLQFLIVAGKDEEYYQALKQSEKECLFPLKCLGYVNYVEELMAASDLLVSKGGALTISEALTLGLPILMFKPIPGQEDGNAEFVESTGGGMTVLSSEELTRVLQYLSQNPGILREMSKLAGSALPNCSSQKAARAIINLREKERVSKEQVIGG

SEQ ID NO: 9085 - protein, 397 aa, Bacillus bataviensis
MEMNSKKKDKILILSASFGDGHKQVANALSEAIQFTLPNVEPVTIDIMEWLHPYLFPISHYFYNRVIKKFPQVYSYFYKRTREKSSFSVKLNTFFTLGMGSMLNVIEKIQPIVVVSTYPFAAGIMSKLKEHGLVDIPTVTVITDYTDHSYWIYPFTDHYIVGSKQVKDRLVSLGIEGHKINHSGIPVLKKFMNTQSREVLAKTYHLNPSQFTLLVMGGGEGFIGKGISTFQALENLSSPIQIIIVCGRNKKLRNQLEKELRNTKHHILLLGYSENIHELMALSDLMISKPGGVTTSEALTMELPLLLYHPLPGQEEDNAQFLVDTGLALLAKNDFDLIGKIEVVTKDVKSLNRMKQRARQYQSKTSSVDALDIIMQTRNQVYEQKSAFIMMPMRQSV

SEQ ID NO: 9086 - protein, 370 aa, Bacillus methanolicus
MNKKVIILSECIGNGHTKAAEALMQGISHLAPSIHTQILEAGQVLHPITTKLLVGSYLKMNSLSPSLWRKMYHYKHNVPLSNWKKFIIYLMFHRQIEDLLEQEKPNLIICTHPFTTSSISRLKRLGYPFTLCTVLTDFHVHGAWVHSEVDVYLVSSEDAYNQLINMGVPKNHIAVTGMPIRSNFWIKKNKQEMRKKLRLKNIPSVMVMGGGLGLGGIKELSHALLKWKENIQIIICTGNNETLRRTLSRNEKFHHPHVRILGFVDLIDEWMEATDLLITKAGGLTCFEAMSKGLPMYIYQPFPGHEEKNCEFLVNNHLAIKIDDITNLDKVIEKLLFSPEEMKSLYDRMRKFQLKIDPLASAEFIVNQFL

SEQ ID NO: 9087 - protein, 413 aa, Paenibacillus sp.
MRSIYEQKIIILTGSLGEGHNQASKAIVESAKRKYPHLRVKVIDYMELTHPRLHVAGQFFFVQWMKHFPSVYGYLFQKTREENTLIQMLKRFSTFSLQKLSAMLEIEKPAIVVSTFPPAAAGMSLLKAMGYTDVPTATVMTDHTDHSYWIHSHTDYYMVGSDVVQVALERKGVPSEKISVTGIPVNPLYSQPVDEERLRDYYGLKPSEQVVLIMGGGEGMIDKEIIELLKSRAYPQDVRFMVVCGRNMKLYQSLLEEFAEHPQITVMGYVDRMHELMAMADLMVTKPGGLTISEALTMERPMLLVKPLPGQEQDNADYLVGIGVARQAMAGELQHQFMTLMTDSSLLQEMKRKAAINTHKDSALSVLTRLIEIQRRYRPSREWAEEKNPVPYEVLNREVYVNEALHHYHDSYR

SEQ ID NO: 9088 - protein, 495 aa, Ktedonobacter racemifer
MKQRTILFLIADTGAGHRSAANAIHNAIKLISQQEQEAWQAQQVNQHTDSETTGATSKATNSLPEPTNYRVEIVDVFEEYSRFPLREAVKLYGPTIRYNPKLFGDVFHLSNQEGTVKAVQTLATPLILNGLMRLITSVQPDIIVSIHPLLNHVTVHALQELGLKIPFLTVVTDLVTVHYTWFAEGADAYIVPTEEAKRLYLQRGLDPKRLHMLGMPIDPKFTLPTEEKEALRKRFNLQDDLPTVLLVGGGDGAGGLQAAVKAISQARLPVQLMVVTGRNRRLYAHLQRTRSNFHVPAKIFGFVHNMPELMRAADIIVTKAGPGTICEALSCDLPIILSGYVPGQEEGNVEFVLHNDLGVLALDPRTLVNELRKLIKPGSEILQRRLANARNISRARASFDIAQCILSYLPVPETGSIWQSRQWQRQQQRLSGRLRSSIRIRRQGVRVRRPVISKTLLRNPVMRRFARTRDISENSTTQDTSSTERAVKRFRGLRR

SEQ ID NO: 9089 - protein, 382 aa, Unknown
  Description of Unknown: Desulfitobacterium hafniense Y51 sequence
MSNLRVLVISAAFGAGHIRAAEAVIEAIWAKRPNTEIYHADFGAFLNKAFHLVIKTAYIDMIKYTPKLWGEFYYRTSDIPSDSLFQRFLNGLGRQEFISYIHSVQPDLIVCTYPTIAGVLAQLKEEELLTVPLAAVVTDYAIHNQWVHQGVDLYLVGSQEVADGLAQRGIDPGCLKVTGIPVSPKFEIKLDREELVGRFGLDPGQPTILVMGGAYGVLDNASGICRLIMQNKLPVQLLIVCGRDKRLYSTLEPLVRKAENRVLLFEFVENVEELMTVSDLMITKAGGLTVSEALTKQLPMVIYKPIPGQEKANSEFLRRVGTGKIAATEGELLQILTHLLENPEEIKIMSHAAAKLPRRTAETAADYLLELFRQRNRVRKVG

SEQ ID NO: 9090 - protein, 399 aa, Peptostreptococcus anaerobius
MKKVLIMTASTGGGHNRAAKAIIEDIEALRYKDQKIECKIIDSFKLVNQTMDKIISDGYEISAKYTPTAYGKIYNISDKKFFSYNEFKNNPLSFIMAKRFKKLLIEEQPDLIIGTHAFPLVALSKLKKGYDEFPPLVSVLTDYTAHSAYLQDEIDYYICGDEFVKELLIEDGIEEEKIKPFGIPVEKAFMESRDRDIIMNELGLDPDKKTVLLMGGSFGAGNIKNTLDELVGIERDFQILVIAGRNKSLKRSLDERIKSYNTDINIKVIGFTNIMNDILTIVDILITKPGGLTTTEALLKEVPMVIPYFIPGQEGENLDFLTNCGVAIRTTKKFSIKSVVKVLIDNPERLERMKDNIRCIRKNYSSYNIALLSLDIFENTSVDYDNFLNRNRLLELFDL

SEQ ID NO: 9091 - protein, 400 aa, Paenibacillus dendritiformis
MYDRGYGKQPKEKVLVLAGSLGHGHLQAAHAIREAARTWYPQEAEVHVVDYLEQVSPHLHTVGSYCFVQWLKMFPNMYGFLFEMTRRDHRFSQLIKNVPLTSLRPLIKLIREVQPTIIVSTFPAASAAVSRLKERGAVQCGLVTVITDHTDHSFWIHPHTDRYLVGSEEARAKLAGQGIPACRIEVSGIPVRPEFYGNYDKVALRRRYGLDPDRMTVLLMGGGCGLLDPDFFRAMEEADWAADMQFIVICGRNERLQRHLEEWAASSSLHIRVEGYVQPVHEYMAMSDLLITKPGGVTTTEAVVQRLPLLVYKPLPGQEQDNIRYLVRKGLACQAEDPEDLVSQLSSFASRPEALQWMSVRAQAERQHTQARVLEAILQVERHPIVPRKTARLRFRRNYV

SEQ ID NO: 9092 - protein, 381 aa, Pedosphaera parvula
MRVLIATITAGAGHLQAAAALDEAWRAMRPKDVVEKVDLQKFFSPLHKTVHSAGYVKLVEHAPDLWAMLFKKTDNPKLVRRLTKFRRAIPPASTLRTIKYIKKFKPDVVFCTHYLPVEVMWRAKEKWEGKPPLVATVVTDFEAHALWMGPSSDFYCVAAEETKARLVARGAVSENVIVTGIPIAGKFSSQINGAEVRKRYGLRDDLPILLVLGGGFGMGPVAEILAELDKVPQQFQTLVVAGRNEELRRELAVQDRKHPTHVLGFVTNMHELMSVSDLVISKPGGLTSSEALAMGKPIFILNPIPGQEAANSDFLLERGAAAKVNRVEDLPYRMGQLLGSKKMVEMAQCAKALGKPSAAMDICRVTLERLEAGSGKRVSAD

SEQ ID NO: 9093 - protein, 381 aa, Paenibacillus sp.
MEKKRVLLLSEGFGTGHTQAAYALSSNLRKLSPDVQTKVLELGSFLNPKVAPLIITAYKKTVTNQPKLFGYVYRHQYKKSLNRLTTLALHKLFYTHTRSVVRQLRPDAIVCTHPIPSAVISRLKRLGVQVPLCTVITDYDAHGTWINREVDLYLVSSDEVKSKLMLRGVPADNIRVTGIPVHPNFWEHPGREEIRSRFNLKNMPTVLVMGGGWGMLSDKLVHPLLTRWHEDIQIIFCLGRNDKTRISMEQNPMYRKENIHIMGYTNEVDKLMEVSDLLITKPGGMTCSEGLAKGIPMLFHNPIPGQEEENVHYFTARGLGEPITSPDVVVKWMNKLLHYYPDVVRKRHLAEIAKVHPMQSAQSIIDLLEDVRPSSAEEAHL

SEQ ID NO: 9094 - protein, 371 aa, Bacillus methanolicus
MSKKVLILSEAIGSGHTKAAEALMQGISHLAPSIHTQILEVGQTLHPLTTKLLLNSYLKIIIRSPSLWRKMYDYKQNKPLSNWKKFIIYQLFHRQIEVLLDQEKPHLIICTHPFTSSSVSRLKRMGYPFILCSVITDFHVHGAWVHSEVDVYLVSSEDVYNQLINMGIPRSRIVVTGLPIRSNFWVKKNKQEMRKKLKLNNIPTVILMGGGLGLGGIQQLAHALLKWKEKIQVIICTGNNETLRSSLLRDTKFHHPHVYILGFVDLIDEWMDAADLLITKPGGLTCFEALSKGLPMYIYQPIPGHEEKNCDFLVNNHLAIKIDDTNNIDILIENLLFSSREMEFLHNKMREFQQKIDPLASAKFIVNCLIP

SEQ ID NO: 9095 - protein, 388 aa, Paenibacillus polymyxa
MNNIKREKLLILSGALGDGHMQAAKAILEASVLYKQGVEVVDFMQWIHPRMHVVERYCFLQWVKHFPSSYGYMYQKTRTDSTLTFFLKHFLTTSLQRLLKLLNEEQPTLIVSTFPLASAAISLLKEKGMTDLPAATVITDHSDHSYWIHPFTDLYLVGSEGVRAALQRKGVADHKIAVTGIPVRPSYSQTDNKDRLREKLALPLDAFVVLVMGGGCGIIDKSFIEQMQSDSFPPNVQFVIVCGRNVKLLNRLHEALGDRDNVMLTGFLEGIHEWMASADVLITKPGGLTTSEALALQLPMLLLEPRMGQEKDNASYLIQAGVAYLCQNDNLEDQLQRLVQQPSLLEEMRENAGLCRQQDSARHAVMQILSMQSDTQEEKWVCSLQQYA

SEQ ID NO: 9096 - protein, 388 aa, Intestinibacter bartlettii
MSKKVLIMSASTGGGHNRAAKAMKEEIEKRCINGEYITCEIVDSLKLINTTMDKIISSGYEKSAKYTPKAWGGVYKISDANIMSKHEFKGNLFNSLLSSRLKKLLKESKPDLIIGTHPFPMIALSTLKKKYPYRNAFNSFFVPPLISVLTDYTAHSAYIQDEIDYYIAGDEYVREVLISEGIEDDKIKPYGIPVEKSFLEHRDKNVVLEELGLESDKFTVLLMGGSFGAGNIKDTLKELLLIDRDFQILVITGRNESLKERLEKSLEKSSFDKNISVLGFTKDMNDILSAVDIIVSKPGGLTTTECLLKELPMIIPYYIPGQEKENLDFLSNCGAALRTSSKFTLTVLLKVLIDNPERVELLKNNIRAIKKQNTSEDIADLVCEIIGQ

SEQ ID NO: 9097 - protein, 391 aa, Staphylococcus massiliensis
MVTQNKKILIITGSFGNGHLQVTNSIVEQLNTLNLDHLSVIEHDLFLEAHPILTSMLKKWYINSFKYFRNMYKMFYYSRPDAVNSCFYKYYGLNKLLNLLMKEKPDLILLTFPTPVISVLMEQFNINIPIATVITDYRLHKNWVTPDIERYYVATKELKEEFHQVGIPQDNIKVTGIPISEKFEQDIDTRQWLKDHKLDPDRETVLMSAGAFGVSKGFDEMITSILRDSENSQVVMICGNNKELKRSLRASFAGCHRVLILGFTKHMNEWMASSNLMITKPGGITISEALTRKLPLIFLNPAPGQELENAYYFTDKGYGKIAQTPKEAIDIVTYLTNHPKQLAQMTDKMAENRISYPTQRLCNDLLSLLSKSSQHDEMYGKVPLYAKILLK

SEQ ID NO: 9098 - protein, 379 aa, Paenibacillus sp.
MRKKRILLLSEGFGAGHTQAAYALSSNLRKLSPEVQTKVLELGSFLNPKVAPLIVSAYRKTVTSQPRLMGYVYRHQKSFNRLTTLALHRLFYTHAQNIVKQLKPDIIVCTHFIPGAVISRLKRLHPSLKAPLITVITDYDAHASWISPQVDRYLVSTPEVKAKLRRRGVAAFKIRVTGIPVHPSFWEQHGREDIQEQFKLLGVPTVMVMGGGWGMMNDEVVNAALAGWRDKVQIVFCLGQNDKLLQEMMQDPRFRHPNIRLLGFTREIDKLMEVSDLLVTKPGGMTCSEGLAKGIPMLFHSPLPGQEEENCRYFTAAGLGEPISSLDVVDRWMERLLNDYGNVRAARKAHLEAISRYNPLQSAQSIIDMLDKPRAEHGE

SEQ ID NO: 9099 - protein, 383 aa, Syntrophothermus lipocalidus
MLSISARHAQTYGKTRVLILGAAYGAGHLQAGLALQAALAHIRPEWEVKTCNFVEMVSPAFDVFSRKFYLFMVRHFPLCYQWFYHLTDAVKPRKGYLLDRFGCRRLQGFVDEFGPRVVVATFPTPGRVAATLKLEGKSQVPVVMVITDHTVHSEWIHPGVDLYLVPDEGVREMLLKRGISSHIIRVSGIPIRPGFADNLNQTAARHHLGLDEKVPVVLLVGGGNGRVTAMEEICAGLSRLRLGMQVLVITGEDVTYRERLCSKFEGDPRFRFYGFVNNMAEFMTAADVLITKAGALTLAEAASAGLPVIIYRCLPAQEEANALYYAQHRAALQVRNQEELLLSVEKILLDRGELAASLSAAIRKLARPRAAFDAACAIAELVE

SEQ ID NO: 9100 - protein, 390 aa, Roseburia hominis
MNVLILSCNTGGGHNAAARAVAETFRAHGDEAVVLDYLKLAGEKVSRTVGNVYVETVKIAPGLFGLLYKIGMLVSRLLRRSPVYYVNGKMAVYLAAYLKKHPADVIVMPHLYPAETITYMKRKGMKLPLTVAVMTDYTCIPFWEETDCDYYMIPHESLIPEIVKRGIPEEKLVVTGIPVAAACSEPWGGTPEESAAADTHAHSIVRKKVQQAAKKSLGLEEKQRYILVAGGSMGAGSIDRLIPALLRRIQGEEHLILICGSNQKLEQRMQARFGRDARMTILGSVSNMPVYLHACDIIYTKPGGLTSTEAAVTEIPIVHTKPIPGCETKNRSFFVKKGMSVTAYTEYGLVRKGMQLLHNPGKRNAMQRAQCQGMEKHSAEKIYQFVKTKI

SEQ ID NO: 9101 - protein, 370 aa, Brachyspira pilosicoli
MKKILIISSEYTGHGHKSVHTALIQGFEKLYKDSVEIKVVNGFTLGGPDLLAAERLYNQCVKYFPKLWEKIFKFSFKNKDFINKNNSITIKRSFLKIYKQYKPDLILNVHPLFSGSLLNIIEKKKLDVKFFILITDLITITKIWFDNRADKIISPSKEATEYMIKNGIDREKLITFGLPVRNGFDAPFASKEDIIKNTNINGKLKILILNNSEKTKRLLYIIKNLYSRYNCEVTIICGRNKHTYNKLNKFYASRSYSPQIIGYTQNIAKLFHDNDILITRSGPTAIIEAVNCIIPIVSMGALPGQEEENPIYIQQNGLGLDSKSTDDIFNKIDLLIANNRENLVKMREAQFDYYGRNVRDDIVKYLADNI

SEQ ID NO: 9102 - protein, 371 aa, Parageobacillus sp.
MSKKVLILSEAIGSGHTKAAEALVQGISYLAPSIQTKILEVGQTLHPLTAKLLLNTYLKIIVRSPSLWRKMYRYKQTEPLSNWKKFIIFQLFHRQIEVLLHQEKPHLIICTHPFTSSSASLLKRMGYNFTLCSVITDFHVHGAWVHQEVDVYLVSSEDVYNQLINMGIPKDRIVVTGLPIRSNFWIKKNKQEMRKKLKLKNIPTVIIMGGGLGLGGIQPLAHALLKWKEKIQVIICTGLNKTLRTALLRDEMFHHPHFHILGFVNDIDEWMEAADLLITKPGGLTCFEALSKGLPMYIYQPIPGHEEKNCDFLINNHLAIKIDDTNHIDILIEKLLFSPQELEFLHNKIREFQQKIDPLASAKFIVNQLIP

SEQ ID NO: 9103 - protein, 387 aa, Desulfotomaculum reducens
MLNKILVLSVSAGEGHMRAAAAVKEEIIRRNSKAEVIILDTFRYASPLIEKVVLGTYMEIIKMSPIIYGYLYRQAEKEKPFSGFAKNEFNRIMNRLAAPKLVTFIDQMQPQAIMCTHPFPLGILTHLKSVGKCKVPIIAAITDFTVHPFWLFNDVDYYLVAVDPLVKSFAEHGIQYNKIKATGIPIDPKFAIPKNKSVLRYRWNLEPDLPAVLIMGGGLGMGPLGDIVKELASSGLPCQMVVVCGRNEQLRNKLIKLQPTLSRKVEVLGYINNIEDLMATCDLMIGKAGGLTSAEAMATGLPMFITDPIPGQEERNAEFLESMGAARLVRGQKDLVHRVKEFLSNVAIQKSMADAAKQIGRPRSAEAAVTVMEELCATYKTKHMVSE

SEQ ID NO: 9104 - protein, 370 aa, Paenibacillus dendritiformis
MQKKILILSELFGSGHTQAAEALAQGIAQLEPSIHTQIVEIGKMLHPTRTAILFRSYKKLITMYPLLWKKIYESKQNQPVSQWLQFTIYQLFHRNMEQMLDQIRPDLVICTHPFNSSSIARLKKRGYPINLCTVITDFHAHGVWVQPEVDLYLVSDEDVHQQLRQMGIPNYRIAVTGIPIKSNFWNKTDKQEARRRLRLKDLPTVMIMGGGLGLGGIQELAHSLIKWREFVQILICTGYNESLRCALQSNAHFQHQHIMILGFVDMIDTLLDAADLLITKPGGLTCFEALSKGVPMLIFQPIPGHEEFNSNRLVNQELAIRINHQDEVDHWIQKLLSSPEPFEFLQSNMEHYQQKINPLAGARSIMKLLS

SEQ ID NO: 9105 - protein, 395 aa, Paenibacillus sabinae
MRKKRVLLFSEGFGTGHTGAAYALAEGIKRLNPAVQCRVIELGKFLNPTVAPWILSAYRKTVSSQPKLVGMLYKTQYHRSLNRFTKLALHRVFYTHARQVIEQLKPDLIICTHPLPAAVVSRLKHLGLNVPLYTLITDYDAHGSWVNAEANRYLVSTSRVKSILTGRGIPADQVTVTGIPVHPKFWERSSKETLRQELGLANMPTVLIMGGGWGLMFGEEIMNALTAKIDQIQLVFCMGSNNKLVEKLRSDPRLRHPNVTIIGYSSDVNKLMDAADLLITKPGGMTCTEALAKGIPMLFYQAIPGQEEKNSQYFVELGLAEMLDSEKVVDKWFRLLRREYAELEEQRRRRLSPDRYQPGNCAATVLEMLGNPKDLSGSLSAQSQPCPDEAIYLTP

SEQ ID NO: 9106 - protein, 452 aa, Ktedonobacter racemifer
MPFSEEGISPSVVADFWEGGALLVSTLQRTILFLLADTGAGHRSAANAIGSAITLLSQEEHARWSESMRREMQPSVDGYEYGCLIDTFSPPNYRIEIVDVFEQCSRFPLREIVKLYAPMIRLSPQLHGKFFQQMNHEAMVKAATALGSPFIQSGLHHLMSNIEPDIIVSVHPVLNYITLQVLRKLGVPIPFVTVVTDLISVHTAWFAPGASGYVVPTEQAKAFSTQKGIDASLVHVIGLPIHPQFTCTTKQENDISERLGLIPHLPVVLLVGGGEGAGGLYTAVRAISQARLPVQLLVVAGRNEELHTRLQRIRSRLQVPMHLFGFVENMPDLMRISDVIVTKAGPGTICEALACGLPIILCGHIPGPESGNIAFVEHNAVGILAQRPREIVDELRRLLQPGSLLLPHRRENALRLSRPHAAFAIGQYILSHLPPPDQPSLWQRRRVSESKA

SEQ ID NO: 9107 - protein, 382 aa, Thermosediminibacter oceani
MDCKKVLILSEKFGAGHERAALALSKGIKNISPDTEVKVINFFQYFHPHVSKVTLKMYLSAINMKPEIWGYFYERERNKKKAGLAKKLLRSAMYFFLREILDKERPDVIVCTHPFPACVASRLKQKGLETPLAVVITDFDVHGFWINDHTNAYITADEFLLKPMLDFGINPSIIYPTGIPIDPNFHREVIGTDAKRALGFREDVPLLLVTGGGLGLTVLDEYTVKQLASATVQLAIICGKNPPLREALRRIVAENHLDNVRVLGFVRNMWDYMGAADLLITKAGGLTIAEAISKELPIVLYNPLPGQEERNAAFLLKKGVAKKAQNQKELVDLVKELTRNKHLIQTMKRNAAGLKKTRPAEKAADIVLSLADHGNKTALISF

SEQ ID NO: 9108 - protein, 380 aa, Burkholderia cepacia
MSKQNKKILLLSVSAGAGHTRAAEAIRAFADHHPAGIEATHLDVMDFVSTGFRKLYTDLYIKLVSSQPALWGYLYQKTDEVDPAAPSQKIRRAIERLNCRALLAEIERQRPDAIICTHFLPAELLSREIRKERVDTPVWVQVTDFDLHSMWVVPNMRGYFAANDEIAWRMHARGMAPETVHVSGIPIMPAFGQPLDRAACAAEYGLDPARPTFLMMSGGAGLGGLDVLAARLLGMDADFQLIALAGKNQAMLASLQELAAQHPGRLFPQGFTQQVERLMACADLVITKPGGLTTSECLAMQLPMIVNSPIPGQEERNADFLLEQGVALKAIDDDALVYRIRALLQAPERLADMRRRLAPLGRPLAGRFVLDRVLGLEPAA

SEQ ID NO: 9109 - protein, 384 aa, Ruminococcus gnavus
MKVLILSCNTGEGHNYAGRALKECIESHHDTADMLDIMMLASPRVSKLVGNSYVNIVRHAPRLFQCLYKLGGLVSSARHHSPVYYANALLAKKLTRYLDTHHYDVIVTPHLFPAQTLTYIKKKNLLSQKVVAVETDYTCIPFWEETDCDYYIIPHYELIDEFTAKGIPRERLKPYGIPVRPAFSDQSDRQKARVRCGIPTHAQVYLIMSGSMGFGKIQLFVAELLRTRKPGEYVVVICGNNRRLQKILLAEFGKQEGVQILGYTEKIADFMAAADVLFTKPGGLTTTEAAVKGIPIVHTRPIPGCETKNLAFYTERGLSLTSQKLHGQILAGRKLMSNDELRHSMCTAQHTVIPPNAAEKTYQLLCQLSSAYAVSDDTAKKETL

SEQ ID NO: 9110 - protein, 403 aa, Paenibacillus dendritiformis
MQEPVTWTVPAGFAFANDNEGKKRVLVLSERFGAGHTQAAHALAVSLRKLSPHVQTRVIELGSFLNPRTAPLIIEAYRKTVSVQPRLVGFMYRTQYHKSLNRLTTMALHRVFYTQAMTVMRQLRPDMIVCTHPIPNAVISRLRRLGLNVPLCTVITDYDAHATWVSPGVSRYLVSTPEVQAKLEAHGVPSHRIMVTGIPVHPKFWETHDRNTKAAIRRRFGLKESPTVLVMGGGWGLIDPSRSSELLTRWRNDIQFLFCIGDNEKLRQRLLDNPRFRHENIHLIGYTQEIDQLMDVSDLLITKPGGMTCTEAMAKGIPMLFYEPLPGQEEENLHYFTEKGYGEPIESAHTITNWMNKLAYHYEEVASRRREFELNASRYHPKACADAILSMLYEQPPTGSSSA

SEQ ID NO: 9111 - protein, 412 aa, Paenibacillus sp.
MRSINEQKILILTGSLGEGHNQASKAIVESAKKNYPHLRVKVMDYMELTHPRLHVAGQYFFVQWMKHFPSVYGYLFQKTREENTLIQMLKRFSTFSLHKLSTMLETEKPAIVVSTFPPAAAGMSLLKAMGFTDVPTATVMTDHTDHSYWIHSHTDYYMVGSDVVQLALERKGVPSKKISVTGIPVNPLYSQPVDQGRLRDHYGIHASEQVVLIMGGGEGMIDKEVIEWMKSREYPQNVRFMIVCGRNTKLYQSLQEDFSDHSQITVMGYVDRMHELMAMADLMVTKPGGLTISEALTMERPMLLVKPLPGQEQDNADYLVGIGVAQQAMAGELKQQLLKLITTPALLQEMKHKAAINTHKDSALSVLTRLLHIQQSYRLREWSDDITAVPYGVLNREVFENEALHHYYDSYR

SEQ ID NO: 9112 - protein, 499 aa, Caenorhabditis brenneri
MNHSILLFLVFLPLSQSLNILFYVPTLSHSHISFNTKLAEVLSSYGHSVTVLLAQVDDTLLIENVTDYTVLRKKVGVPRGHLRQVLWSNPGPYEDSSPLNPHIFYKLLKVSRTFVTACENMAFDTLFLENLRDQKFDVGLVEQYDACGFGIFKFIGIKSTVWLSATAIYRPQAEAMGVHLPYSYVPELFAHFNDKMSFIQKVINVMIGQATSFVLDVFVQGFQSRIFGFNEDLGEISKQTSSVMINSVPFFDYSMPISHQFSNIGGITVDKKGTKKLDPYWQSVADSAENGFVLVSFGGIARTVDMTSSMQKIFFDSFSRFPQITFIVKYESATNFTMPENVILTPWISQLPLMAHKNYKTIITHGGWSSILETTMYSKPMILMPLFADHAKNSKVAESKGVAVLLDKMRLSQRRVMHAINTILTNPRYTQNCEKFSRMFSDTPIPHEDLIEWRIRQAAKPSRKAFAKHLRPKEPNFHLLKIILFVIPLILVFYSKRVF

SEQ ID NO: 9113 - protein, 329 aa, Medicago truncatula
MENKIISTKSVHCLVLPFPAHGHTNPMLEFSKRLQQREGVKVTLVTTISNYNNIPKLPPNSITVETISDGFDKGGVAEAKDFIIYLNKFWQVGPQSLAHLINNLNARNDHVDCLIYDSFMPWCLDVAKKFGIVGASFLTQNLAMNSIYYHVHLGKLKPPFAEQEISLPALPQLQHRDMPCFYFTYEEDPTFLDLVVAQFSNIHKADWILCNSFFELEKEVAVWTMKTWSNFRTIGPCLPNTFLDKQIKDDEDYGVAQLKSDECLDWLNNKPKRSVVYVSFGSMARVKEEQIKEVAYCLKDCGSYFLWIVRTSEETKLPKDFEKKNQRMA

SEQ ID NO: 9114 - protein, 470 aa, Diploscapter pachys
MFARMNDKVSGNGTSKARRIKNFGWEGSGPWSQRAAYLSSFFEPQPLGLDDISAFYDTTNDLCYLAMSDPSVVEFIKEGNYDLAIATDYEFCPFLLFDIAKVPSVVSYVPTPLFPWNLHMSGVPTTPKVYASVLDAEHNQGFIHTTWHLIKSIYIIYYRIPAKNRNQTGVARQFYGPEVKDGHSLAHRTNILFANSNELLEKPLPLPHKVKYIGGLNLGEPKPLNAEFDRILSNAKKGAIVFSFGTQAPMKFVPFKIRKCFVEAFKRFPDFVFIWKYEKQPDDSELFNNSTNVHPLEWIPQWDLLNDKRVVGFISHSGLNSFNEASHAGMPMLTVPLFVDQLHNAKNGERLGTSILLRKTNITSESVADCLQKLLFDDRYRNRAKTISNMLREKPNKGKETFIEWVEFAAKYGNLHEHLNLPGSLMSPIEYYLIDLALIDISILVISFLVLKRILKSVFASSPREKRKRD

SEQ ID NO: 9115 - protein, 238 aa, Brachypodium distachyon
MDSTGTGSSVAHEGGEGANVFFLPVPGAQGHTNPMLQFGRRLAYQYGFRPTLVVSSYTLSTTPPPDAPFRVAAISDGFDDGGKPSGPDMTEYLRRLEAVGSDTLARLLSDEARAGRPVRVLVYDPHVSWARRVARDAGVPAAAFFSQPCAVNIFYGEVHAGRMAMPVTESDACALVGGGTLGVELRPEDLPPFVALPEWHPVFTKTSIRQFDGLEDADDVLVNSFRDLEPTVICRAAY

SEQ ID NO: 9116 - protein, 224 aa, Citrus unshiu
MENNEKKASASSKLANCLVLSYPAQGHINPLLLFSKRLERKGIKVTIVTTYFISKSLHRDPSSSISIALETISDGYDKGGSAQAESDQAYVDRFWQIGLQTLTELVERMNDVDCIVYDSFLPWALDVAKKFGLTGAAFLTQSCAVATIYHHVNKGLIKLPLIGDEVLLPGLPPLDPQDTPSFINDSASYPAFFDMIVTRQVSNIDKADWILCNTFYELEKEVIK

SEQ ID NO: 9117 - protein, 226 aa, Ricinus communis
MANQTHQLHFLLAPLMSQSHLIPFTDMAKLLAQRGLIVTIIMTPINADRYSKIIELAKNSNLRIQFLTLQFLGKEVGLPEDVKTWIPFLRRSHIPFLSMYRWKRTTGGFLTHCGWNSTLEGVSAGLAMITWPMFAEQFHNAKMINEVLKTGVKINGVEEENHLLVKNEDVKIAIEQLMGDGEEGKDRRRRAKELGKMAKNTVEEGGSSYSNITHLIQYVREHVTPN

SEQ ID NO: 9118 - protein, 538 aa, Anopheles gambiae
MSNCSSQSGRKIPADYSIWLTKTTKPTNSQHPSNPRVIPPTARSRAQYIGLRPLMYEMGRRGHNVTVLSADIEKQPPANVTYVHLENFYSTMYNTSMRQKLNFFEMANESPAKMLKLFDEFGLNLCEAAIKSEGLHFLLGYPTDFKFDLFLSDFMIGPCVPAIIMHRFKGVPYIPTTPYNAPSTAATVLGAYAYSGLVPNHVFDAPESMSFMQRVKNFYYDLYEMILHDTLMHPEADKIVRKLYPDAPPSNSFYKNVRLSLANINPIIQYKEPLMPNMIPVGGLQILPPKGLPEDLRKVVEGAKNGFILFSLGSNARSDLLGPERIRNILTAMERLPQYQFLWKFESDESKLPMAVPKNVFIRAWMPQNDLLAHPNVKLFITHSGLLSTQEAIWHGVPIIGFPVFADQFRNINYCVEAGIGKRLSIQHFQADELVQAVREVLGSDRYSARMKRISRLFRDQKETPLERAVWWCEWVLRNPDADLLQSRAMYMSWFQKYSYDVLTFYLAVILALVALAWKLLSIVKHSFLASSTKSKVE

SEQ ID NO: 9119 - protein, 313 aa, Cephalotus follicularis
MENQSGHVIVVTYPAQGHINPLLQFAKRLVSKGIKATLATTHYTVKTIQATTVGVEPISDGFDESGFTHAPSVQVYLESFKTVGSKTLAELIMKFSDLGSPVSCIVYDALLPWVLDVAKNFGICRAVLLTNSASVCSLYWQIHQGNLSLTVKQETLPLMLPGLPPLGYSDIPSFLAQPENHSAYLAVILEKFGCLSENDWVFCNSFQELESELVMALQGIWPLVMVGPLVPSAYLDQQIEGDTAYGASMWNPSSDNCLRWLNTRPPRTSCDMVQSTRGSSSPSCGLLHYTWWMELDTRGVEPRCPNGGSTAVE

SEQ ID NO: 9120 - protein, 210 aa, Cephalotus follicularis
SSLLFNYLDTVIDWISDMQGIRLRHLPSFVTNTDQDDIIMNFIKGEVGNIPKASKRVKEMAFPWLEMDINLGIPLWNMQLCTYSNKEQPWHLEWLDSKEPNTVGYVNFESLADITSQQLVEFSWGLANGKHTFLWVIRSDLVIGEFTILPPEFLSENKERGLTASWCPQEKVLSHPTIGGFLTHGLNSTMETLSSGAPMICWTFFTDRQT

SEQ ID NO: 9121 - protein, 529 aa, Wasmannia auropunctata
MWSKTCTFVIAFLCVIVQHNVTYAKRILVIANFPSYSHQISYRGLWLELHRQGYEIVVATTDPIKNSSLTNYTEIDLKYFYNGFPEYKTLPYTSLTTAVLEVPLLELERQFIWFIAHILNREVFKNPEMKKLYAASSNEHFDAVIVAQGPTISMNAFAYRFNAPLIGISSLDVYNHMRYTFGSLILPSHISNWQTNVPVENNMSFWRRLVNFYEVWKQMYSWANEHTAIEDALVKKYLGEDLPHIDDITRNMSIYLVNRHPAFLHGRPEQPNVIFYHGFHIAKVPDALPKNVKQFLDDAKEGFIYVSLGTNVKWEDLPNNTFEAFVDAFSASPYKIVWKFNPDLLPRNSKNILALQWCPQQSILAHPNIKLFIYQGGLQSTEEAVYYGVPLIGFPILWDQIYQVRNLVRLGAGVHLQIDNLSKEIVEATIHEVISNTSYKDRVQHLSRLFKDAPYDSLQNAVRWIEYVIRQNGTSFLRNSLCDEPWYQRYDWDIIGFLAIILFITSLISIWALLLILRFHLRIISYSLW

SEQ ID NO: 9122 - protein, 333 aa, Citrus unshiu
  MOD_RES (282)..(290): Any amino acid
MENIEKKAASCKRVHCLVLSYPAQGHINPLLQFAKRLEHKGLKVTLVTTYFISKSLHRDSSSPSTSIALEAISDGYDEGGSAQAEGVEAYLERFWQIGPRSLCELVENMNGSGVPVDCIVYDSFLPWALDVAKKFGLVGAAFLTQSCVVDCIYYHVNKGLLKLPLLDSQLLLPGMPPLEPQDMPSFVYDLGSYPAVSDMVVKYQFDNIDKADWVLCNTFYELEKEVAQWLGKHWSLKTIGPTKPSMYLDKQIEEDKDYGFSIFKPNNESCIKWLNDRANGLXXXXXXXXXRCKEIRQNAGKWSNFAKEAVTKGGSSDKNIDDFVANSISSKSF

SEQ ID NO: 9123 - protein, 205 aa, Unknown
  Description of Unknown: Oryza sativa Japonica Group sequence
MASMNDQHGGATAHVLLVPLPAQGHMNPMLQFGRRLAYHGLRPTLVATRYVLSRSPPPGDPFRVAAFSDGFDAGGMASCPDPVEYCRRLEAVGSETLARVIDAKARAGRAATVLVYDPHMAWVPRVARAAGVPTAAFLSQPCAVDAIYGEVWAGRVPLPMEDGGDLRRRGVLSVDLATADLPPFVAAPELYPKYLDISIVRISPL

SEQ ID NO: 9124 - protein, 262 aa, Brachypodium distachyon
MDSTGKSVMATSEGPSILFLPFPGAQGHANPMLQFGHRLAYQYGFRPTLVVTRYVLSTALPPDAPFRVAAISDGFDAGGIRSCLDMAEYWRRLEAVGSETLSRLISDEAREGRPVRVLVYDPHVAWARRVAREAGVPAAAFFSQPCAVDIFYGELHAGRMAMPVTEADARALLVRGAIGVELALDDVPPFVVVPESQPVFTKASIGQFEGLEDADDVLVNSFRDIEPMRLRLTPSTIWAPTLLWIPSLDAQRPRIQSFRRNR

SEQ ID NO: 9125 - protein, 225 aa, Cephalotus follicularis
SSSQKEIEMDKGHVVVVPYPGQGHINPLLQFAKRLASKGVKATFATTYYTVKSINAPNIGVEPISDGFDEGGFADAKKEDIYIESFKANGSKTLSQLIQKYENTNFPVNCVVYDSFLPWALDVAKQHGIYGAAFFTNTATVCNIFCRIHHGLLTLPAKQEDMPWLIPGLPPLYFRDLPTFIKMPISNPAYLAMKLGQYPNLDKADWSFANTFEELEGEVFFYSLL

SEQ ID NO: 9126 - protein, 374 aa, Unknown
  Description of Unknown: Oryza sativa Japonica Group sequence
AHRHRRRSRWRTSNVGDDNHGGGRVLLLPFPAAQGHTNPMLQFGRRLAYHGLRPTLVTTRYVLSTTPPPGDPFRVAAISDGFDDDAGCMAAPPDYGEYHRSLEAHGARTLAELLVSEARAGRPARVLVYDPHLPWARRVARDDGVGAAAFMPQPCAVDLIYGEVCAGRLALPVTPADVSGLYTRGALGVELGHDDLPPFVATPELTPAFCEQSVAQFAGLEDADDVLVNSFSDLEPKEAAYMEATWRAKTVGPLLPSFYIGDGPLPSNTAYGFNLFTSTVPCMEWLDKQPPRSVVFVSYGTFSSYDAAKLEEVGNGLCNSGKPFLWVVRSNEEHKLSRELREKCGKRGLIVPFCPQLEVLAHKATGMGTNKNSN

SEQ ID NO: 9127 - protein, 518 aa, Haemonchus contortus
MLQFPFWSLAVVAAIIAIANAGKILVYSPSISYSHLISNGRIADTLVRAGHDVVMFIPEYISSTSKFNGTKLAKVIRMNNISTLYEDGLLGGEVGLMKQARLSFTERLEFEYCLTEICRAIMARRNELEPLKNYGFDAAFAEQIDLCGIGVIRYLGIRNLLWISTTPLMDAVSYNLGVPAPPSYVPTIEENDNGDTMNFWQRAYNQYMYFGAIYIHRKGTDMTTEVFRQYDPTFPNVREIAANASLCFVNADEMFDFPRPIIHKTIYIGGLGISEPKPLNEKFSALMKKGKKGVIIVSLGTIAPFHAFPDVTKRAFVSVFKSMPDHHFILKIAKGDSTTQSFMKGVRNCDLIEWLPQSDILAHPRLKLFVMHGGINGMMEALLRAVPVVVIPIFADQFRNGRNAEKRGVGKVILKLELTEQTIKTAIEEVLNNESYKKNAIRLAKLMSEKPFSAEERLVRWTNFAVENGVLDELHVEGSRMNFIVYFNLDVFFVGIIALCLIAYLKINKMSSNSSSGS

SEQ ID NO: 9128 - protein, 512 aa, Plutella xylostella
MNLIKTFGVFASLLTLCVDSLNILCILPYEGKSHFFVFKTFLLELERRGHNLTVISHFPEKSPPANYHDISLAGTSDIFEDAMPLKRNYWTLISTGLFLSWTGTANCDAMLQNKRVQGLVKNKQKFDVALVELFNSDCGLGLAYKLGAPVVSITTHILMPWHYKRFGIPDNPSYVPYHFLEGGSKPTLYQKIERIVFDVYVQTLYYYWTQRNNQNSIARYIGEVPPLEELGRQAKFVLLYHNFVLTGSRLFPPNVIEVGGYHVGKAKPLTGALKDFVANAEHGVVYISFGSVVKSSTLSAEKLEAILAALDEFPQKFVWKWENETQLEGRKNLYVSSWLPQIDILAHPKTVAFFSHSGMLSTTEAIHFGVPMVAMPVLGDQPANAASIEECGLGVQIQYRELTKDSLVAALKKVLDPEYRQQVKALSKTWHDRPMSPMDAAVFWTEFAARHPNSTFRTAAADVWFYEYMYLDVLSVFVVVFSVTVWLVRLACYRARKQDVRKPKAKAKPKRH

SEQ ID NO: 9129 - protein, 504 aa, Caenorhabditis briggsae
MKHTLFEYLILIFLFINTISASLNILFYVPTLSHSHISFNSKLAEVLASHGHRVTVLLAQVDDTLLIDNATDYTVLRKKVGVPRGHMRRVLWSNPGPYEDSSPLNPHIFYKLLKVSRTFVTACENMAFDNLFLESLMEQKFDVGLVEQYDACGFGIFKSIGIESTVWLSATAIYRPQAEAMGVYLPYSYVPELFAHFSDKMSFVQKVINVLIGQATSFVLDIFVQGFQSRIFGFDENLASISKESSAVLINSVPFFDYSMPMSHQCSNIGGITVDKKGVKKLDPYWQSVADSSGFILVSFGGIARTVDMTVSMQKIFFDSFKKFPHITFIVKYESIANVSMPENVILTPWIPQLPLMAHKNYKTIITHGGWSSILETTMHSTPMILMPLFADHAKNSKVAESKGVAVLLDKMRLSQRRVVHAINTILTNPRYTQNCEKFSRMFSDTPISHEKLIAWRIRQAAKPSRKAFAKHLRPKEPDFHMLKIVLIIVPAYLVFCTNKFLYG

SEQ ID NO: 9130 - protein, 379 aa, Brachypodium distachyon
METNSPSSAEEGSGTGGGAHVLLLAFPGAQGHLNPLLQFGRRLAYHGLRPTFVTTRYLLSTVPPPAGPFRVAAISDGFDAGGMAACSTGFGDYGRRLAAAGSETLEALFRSEAEAGRSVRALVYDPHLPWAARVARAAGVRTAAFFSQPCAVDLIYGEVWSGRVGLPIKDGSALRGLLSLELEPEDVPSFVAAPDSYRLFLDAVVGQFEGLEDADDVFVNSFHDLEPKEADYLSSTWRVKTIGPTLPSFYLDDDRLPSNKTYGFDLFDSTAPCMAWLDSHPPCSVVYASYGTVADLDQAQLEEIGNGLCNSGKRFLWVVRSVDEHKLSEELRGKCNEMGLIVSWCPQLEVLSHKATVSSYKTMPIIFLREGFDKVTFTI

SEQ ID NO: 9131 - protein, 346 aa, Citrus unshiu
MEEKIHRAHVLIVPYPSQGHINPTFQFAKRLASRGLKITLALTNFIYKSTKPSSPSGSVQIDTISDGYDDGDLSKAESIHAFFQNMEVPGSKTLAELITKFKSTSNPIDCVIYDAFLYWALDVAKGFGLFAAAFFTQTCAVNFIYYLVHHGLLKLPVPLTPVSIPGLPLLELQDMPSFIGVQGQYSAYFEMVLNQFSNADRADLLLVNTFYELESVVGNFAITKTFSQILSKQVADSMAKSCPVLTIPESKRQSVTTIVNSSHYTNPSASIGSTKSPRTIVVIVAFGKHGLFSQLNKWKNWREGLKKSSFLFSWVIRRHEGRQYKAPKGFVDEMAIKVLIVIGASR

SEQ ID NO: 9132 - protein, 237 aa, Citrus unshiu
MPGKLEELIEEINRQEDEKISCVIADGAMGWAMVAAEEMKIRRAAYLACSSWTTGLLMMKFISLFISRTAIKKHMIQLAPTMATIHSTKLGEWMLCKSKYDLEPGALALIPELLPLGQLLASNRLPFLWVVRPDMTDNSNDDAYQKGFQDGVGTRGQMVGCAPQQKVLSHPSIACFLRHCGWNPTTEGVSDGLPFLCWPYFAEQFLNESYICDIRKVGQRFNKTKMGSSQGKKLRRN

SEQ ID NO: 9133 - protein, 312 aa, Crocus sativus
MIPMVDMARLLADRGVLVSIITTPVNAARIKPVIDRSISAGLPIRFVELDFPCAKAGLPDGCENFDLVPSIDLYKPFVEAFEFLREPLELYLREPDVPVASCLITDSCHWWTAAVARAFGIPRFVFYGPSCFFNLCVHNIRLHDAYGSVVDDFEPVVIPGLPLRVEIAKAQAPGGWFCTPGWEDIHGKVVEAAGTADGVVINTFRDLEPEFLGCYEKAVGKSVWPIGPLSLYNKDFASKASRGNKASVDEGRLSSWLDSMEPGSVVYVSFGSLARNGPSQVVEIGRGLEGSGRPFVWAMKEAERCPEVEEWM

SEQ ID NO: 9134 - protein, 270 aa, Zea mays
MYTAASRGQQSPRISPGCGVVHDKGLRHYGLVTDHAPQQAVEGGGGTEESLDEPVPDLEPLQARDLIRVDGSDTDALCGFVGHVADAVRASASGVVIYTFERMEASELAKIQRELSRPALARAVPSGVRGGASALAVPGTDGAEPARARPRLLAWLDDHPPRSVLYVSLGSVACVDRGAFVEMAWGLARSRVSFLWVGRPGLVGGVARAGPTQTGRAGGRSSSRACCGGLGPNAGRAGDRSSSRADGGGVGPNVARAGGARAGPAAAVRG

SEQ ID NO: 9135 - protein, 243 aa, Punica granatum
MEKSPGKLSRIVLVPCPAQGHLSPILQLGAVLHSQYGLSITVVHTNFNFPKNQPPPFRFISMPDHLSDEDISSNDFINVMSKLNINCKVPFRDVLGNLVQQAGGEEAGVACVIYDGVMHFPEEVARELGIQSMVFRTLCAGNIRIYKEYPRLVKEGYIPVHESKSLDDVPGLHPLRLKDLPVYKLKGYEGLLRLLEKACETGSSSAIIINTTEALDREALMELQKQHHIPVLAVGPLHKIAPP

SEQ ID NO: 9136 - protein, 540 aa, Wasmannia auropunctata
MSSCFILLFSLVCCISISLVAASKPLSILLIEALPTSSHHIWTVHLIKGLLRKGHHVHAVSIHETKVEGKLAQNLTYSVFDGLIDEFEKSEEFNPTVWAEYSAFYMSYFMFDLGIQTCDIVIETKAAKELLETIKTVEFDVIVQDISLLECLFGLWEVAKGKPPAVGYVPFGPAPWIKDYVGGSNYPTVRSFPYVAIAKPVGLWQRTWNVLYYVADDLLRHYYYLPIIQRQTEKYMGHAIRPIHDIEKDSINIVLINSHSAFDSGIPLPPNALEIAGLNAQTVQPIAGEKVITYPENMRIFLDEAKNGVIVISLGTNVKWEFIGVDKVEAVILALSKLKQRVLWKLDIEMSSKIPDNLMIVKWMPQNEVLSHKNVRAVWTHGGLLSTQEAIWKGVPMIVMPFFMDQKSNAEMLVAKGVGTYLDVRNFTVQNVLYAIEEVLYNESYTRNMKKLSSEFRDRPLPPLDLAIWSIEYAVRHPNGSLATPLRSQSWIEQNLIDVYTFLFFILTILLLSTYFTIKIIINLCCNYMYTSKLSKKKQA

SEQ ID NO: 9137 - protein, 206 aa, Helianthus annuus
METLGSVSTIRSRRIILFPLPFQGHINPMLQLANILHTRGFKITIIHAEYNSPNPSNYPHFTFKPIKDHLSKVAHEYPTNRDGTYFVRYLNKSCVDPFTDCLAGLLAEPGEERVACVITDACFYFTQAVADDLKLPRIVLRTSGLGCTLACDALPFCSKKACFYLTKQDSDYEASVPEFPLLKFKDITNITINPQDLKNQCRNIHY

SEQ ID NO: 9138 - protein, 296 aa, Panicum miliaceum
MAGGVGGREPRRRALVFPLPFQGHIDPMMHLAGALHARGLAVTVLHTRFNALRPARHPEFRFVEVPDGVPADVAREGKIIDVILAMNAAMEASPAAVRAALASAMNDEAEGEGRPPRRAACLFVDGNLLAVQRVAEALGLPTLVLRTGSAACLRCFLAFPMLHEKGYLPPQESNLYTPVPELPPLRVKDLFLSPVSSHEKVREVLARITETVRNSSGIVINTSEALEAAEMERLRAELAGAHLPLLLAAGPLHKLSSRSAGSSLLDQDRSCIAWLDARPPGSVLYSPPSNDKQWNP

SEQ ID NO: 9139 - protein, 300 aa, Hordeum vulgare
MRKEEFGEQELVVAAVLADLLSPSGRDLAGLCGGLLRRRPYPHAPAAGSSALSVRQAGRGAELAGLLHARGFAVTVFHARFNAPDPSRHPAYGFVPVPDGLPAGTPETVAATMEHILAVNTSCEAPFRERLAALLDAPGARDEVACLVADAHLLALVRVARRLGVPTLVLRTGSAACFRNFLANPVLCEKGYLPVGAESKLDAPVRELPLYRVRDLMGANSRSRHEHELMCELLSRAVEAVRSSAGFVLNRFDALEADDLAATRRDLAGVPVFDVGPLHKLSPASSCSLLQQDRSQQGIE

SEQ ID NO: 9140 - protein, 269 aa, Atta colombica
MATLVTYLFTHAHSILANINIKIAKRDCATVSFEHGIPLSPNILEIAGLNVQAIKPIDGEIVVTYPEDIRAFLDGAKNGVIIVSLGTNVRWKFIGLDKIKIVSLALSKLEQRILWKLDIEVPFEIPDNLMIVKWMPQSEVLSHKNVRAIWTHSGLLSTQEAIWKVPMIVMPFYIDQNFNAQKLVAKGVGIYLDVKTLSTQTVLHVVEEILYDERRDAAKHIGPPYQAVLGNEALFPSPCALPLPPFECGPSYEFAWRGLTAYWLRHFLF

SEQ ID NO: 9141 - protein, 371 aa, Oryza sativa
MATQEREPERQPHAGRRVALFPLPFQGHLSPMLQLADLLRARGLAVTVLHTRSNAPDPARHRHGPDLAFLPIHEAALPEEATSPGADIVAQLLALNAACEAPFRDALASLLPGVACAVVDGQWYAALGAAARLGVPALALRTDSAATFRSMLAFPRLRDAGFIPIQGERLDEAVPELEPLRVRDLIRVDGCETEALCGFHRPRRRRDAGFGVWGRRQHVRRHRGVGTGQDRGRAVQANLRRRAAAQAHHGEDGGGAVPPFRAPVRSGPRLPRVAGRAPAALRAVREPGERRLHRPRHVRRNGVGSRRQRRAVPLGQPARLRPRLYASATLRGRREQGQDRAMGAAEGRPGAPGHRRVLDALRVELDAGERL

SEQ ID NO: 9142 - protein, 280 aa, Aegilops tauschii
MTTQEKAPHAVRRRVVLFPLPFQGHLSPMLQLAELLRARGLAVTVLHTDFNAPDPPHHPELAFVSIHEALPHVATSPDADIVAQLLALNNGCEAPFREALASLLLLLLREDVACVVVDGQWYAALGAAGVLGVPVLALRTDSAATFGSLLAFPRLRDAGYVPIKEERRDELVPELELLRVRDLIRIDGSDVDALCGFIARVADAVWASTSGVVLNSFDAIETPELARIEKELSCPAFAVGPLHRMCPGPAPAEHGLHAPDRGVTTQRRKRGGDRDQIEGR

SEQ ID NO: 9143 - protein, 263 aa, Citrus unshiu
MERQEQQKASRLVFVLYPSQGHINPMLQLATILHSKGFSITIIHPKFNSPNSSNYPEFTFIPISDNLPESQDSFGDIFGIVSALNKNCEGPLTECIQQMLKAEDPQDRLSCIVYDSVMHFSQSVADHLKLPGISVRTGPAATMFAFAVCPRLDEQGYISFLESMSLDGKSDLLSLLLKELAFSMKKFTAHGLLELRAAVTDSVQRCSALILNTVDFIEQEALTKVQELFSASAFTIGVMSSRQINLDHDGYELDQITYPTQVV

SEQ ID NO: 9144 - protein, 528 aa, Daphnia pulex
MIKCSVFLVLVVNCFVFCHASKILVLSPVASKSHKISMMPIVRALAQRNHHVTIVTSHSQEEYLENVHDIVVPNPYMNDGKFDWFAMNSINPFVLQFQIFYNFATISKFNYEAVMNNPEFLLVLKRREIDLVILDDSFNDFCLKIIEDLKVPFVYFSSSTGYPWVFNSMGASQELSSVPSRFTGYDSTMNFKQRIFNTLAGLGAQILRSFIVIPAIDAYTKKDFPSARSISDIEKDASLYFLSSQWATTWPRSVPPTVIQLGPLHIRPPQTLPQAMDRFIREFEKDGFILFTLGSIPSSKFMPKKYVQTFVKVFSRIPQRVIWKWDDSSEIPENLSANVLLVDWLPQQDLLGHSAIRLFITHGGFLGMQEALYHSVPLLALPFGTDQYLNSAKVRKEGCGLHLDWDNLDEATLFTSITSIINNSSFKDNTRRLSLLMHEEFLKGQDTAVNWIEHVIRFNGTKHLKPTSQNIPFYQLYLLDVGLFLVVISFIIVFVTANMVRFIIWCLLASFYKFKTTPSYKSNLKKIT

SEQ ID NO: 9145 - protein, 204 aa, Punica granatum
MQASVLGSPTGVGSSPVPGPHKPDAPTCSGFSTHMASPSSSLTLRSTRDPSITVQTCSASNIVTYLAMPRLFQLGLIPPQGWGWVPPLQATCQRRTLVAKHGLTNKPLTRSSTSVQEAVLMNEKEVSERAWGLANSKQPFLGAVQPGSVQGLDRLEWLLEGFWQGVGERGHIVKWAPQKAVLADKEVGGFLSHSGVELDPGEHC

SEQ ID NO: 9146 - protein, 968 aa, Trachymyrmex septentrionalis
MNLIKGLLRKGHHVHAISTYETNIKDKLAQNLTYDVFDGLMKVIEESEEDFDPVKWEQYNVFYMMYSAYHWGIYACDSVIKTEAAKKLLEMIKTVEFDIILQDVTFNECLYGLWEIAKGKPSIVGYIPYSAAPWLKDIIRGPSYPTLRSYGYLPIAKPIGLWQKTWNTVCFTVDDFTRHYYYLPIMQRLAEKYVGHSIRSLHEIEKNSINIILLNSHPAFEHGIPLPPNTLEIAGLNAQAIKPIDGEIVVTYPEDMRAFLDGAKDGVIIISLGTNVKWKFIGLDKVKTVLLVLSKLKQRVLWKLDIEMPFEIPDNLMIVKWMPQREVLSHKNVRAIWTHGGLLSTQEAIWIGVPMIVTPFYVDQKFNAQKVVAKDVGVYLDINTLSTRTVLHAVEEILYNKRYTRNMKQLSSEYRDRPIPPLDLAIWGIEYAFRHPNGTLITSLSLVTTSKTLSILLLEPIPSTSHHIWAENLIKGLLREGHHVHTISIHETKIEGKLAQNLTYAVFDDVMKTYEESEDYNPSEWEQYSVFYTGYFTYQWGINACEAITKTKAAKELLEMIKNVEFDVIVQDITLTQCFYGLWEIAKGKPPIVGYIPFGPAPWLKDFIGGSSYPTVRPYTHAAIAKPVGLWQRTWNTLYYFMDDLIRYYYFLPIVQRLAEKYVGHAIRPLYEIEKDSINIVLINSHPAFDSGIPLPPNTLEIAGLNAQSVKPIADEVVVTYPEDVRVFLDGATNGALIISLGTNVKWKSIGLDKIKTVILALSKLKQRILWKLDIDVPFEIPDNLMIVKWIMQKEVLSHKNVRAIWTHGGLLSTQEAIWKGIPVIVMPFFMDQKSNAQILVAKGVGIYLDIKTLSKQTILHAVEEIFYNESYTKNMKQLSSEFRDRQISPLDLAIWSIEYTVRHPNGILVTPLKFQSRIQQNLIDVYIFLFFNIIIILLTIFFVIKILIYFYYNYIYTASKFHKNKQS

SEQ ID NO: 9147 - protein, 479 aa, Atta colombica
MSSCFILLLLAYFIVIGLVTTSKPLSILLIDPVPSLSYHVWTTNLMKGLLRKGHHVHVVSTHEIKIKDKLAQNLTYDGSNVFDSLMKVMEESEDFNPVEWEQYSALYMMYSAYQWGIHACDAVVKTKAAKKLLEIIAKSKPPIVGYIPFSPAPWLKDLIGGPSYPTVRPYAYLPIAKPIDLWQRTWNTKKTVLYYSIVILHGIPLSPNILEIAGLNVQAIKPIDGEIVITYPEDIRAFLDGAKNGVIIISLGTNVRWKFIGLDKIKIVLLALSKLEQRVLWKLDIEVPFEIPDNLMIVKWMPQSEVLSHKNVRAIWTHGGLLSTQEAIWKGVPMIVMPFYVDQKFNAQKLVAKGVGIFLDIKTLSTQTVLHAVEEILYDERYTRNMKKLFSEFRDRPIPPLDLVIWGIEYAVRHPNGTLATPLRYQSWMEQNLIDVYAFLLLNFTIILLSIFLIIKVFIKFYYRIYTTFNNKLHKRKQA

SEQ ID NO: 9148 - protein, 217 aa, Helianthus annuus
MLFTFCFNYTTLEKSLKLFIAHVIYFLFQLAPKNLNFPIMKNHEGTGTIFQSTRSTATRGRVILFPLPVQGHLSPMFQLANILRAQGFKIIIIHTEYNSPSHSNYPHFTFKTIADGGFSEIRNNMKKSDPAFSISYFNEHCADSFTDCLAGLLAEPDEPPVACLITDAEYYFAQEVADSLKVPRLVSWACTIVSLLVYRDLSFFYEKGYFNLTKNGV

SEQ ID NO: 9149 - protein, 263 aa, Helianthus annuus
MAKLTKIAMNNKALVLFPLPFQGHINPMLQLANILYTKGFKIIIIHTNFNSPNPSNYPQFTFKSISDGLSTSKDKSLNLDTTNHAINFMNKSCIDPFAVCLAKLLEVEPVACLISDALWHFTQSITDRLKLKRIVLRTSSMSCIPLYAALVLGEKSYYKTTIKEELALMTKMDIEKIYKGGLEKAKAELICNMINETKAASGIIFNTFKELEEPAFLAISQVFQIPSFAIGPFHTYFPASHSSLIEQDRSSISCMNMIRWFCW

SEQ ID NO: 9150 - protein, 463 aa, Unknown
  Description of Unknown: Phyllobacterium phragmitis sequence
MRIIMAATPALGHVIPMLGIARILLSEGHEVVASTASAYQDRVKSVGAEFWPLPESADHDAQAKLPELKTLPPGFEWLRAAMCGLINEIPAQYMGLQQMLQEAPADIVIADDQFFGVLPMLLGARSARPPVVLFGTTILHWHREDGAPNFLGLHPAISQAQHEEYAAITREYDNIVRYPVTRYLDRCLEGVGAGPLSKPLLESVVELTDAYMQLSVPSFEFTHAVPPSVQFVGALPIIPNQAPLPPWADDLDGRRKVILVTQGTLANHDFNLLITPTLAALADEPDLLVVVTTGGRPIEVIPRPIPANARLASYLPFEWILSKADVFVTNGGYGSVNQAMSFGIPLVAAGLTEDKADVNARVAWSGVGVNLATNTPTPVALRNAIRAVLDDAQSYRQHASLIAKEFAAIDTRAEVLRVVGQVAQRLEGVHTHQSRELSLSSWPYFGVNDSIYLDNTQEYKIRS

SEQ ID NO: 9151 - protein, 428 aa, Pseudomonas stutzeri
MTHFAAIAPPFLSHLRAFEAIAWQLQQHGHRVTFIQQADVGALLDLPAAGFAAIGTDTHPPGSLGAVVRRAASPGPFGVRRVIADMAASTELFCREAPAVLRALEVEAVLADQMEPAGALLAEHLGLPFVSIACALPFNREPLVPLPVMPWRYRATDWGEQLNRHSSGVYDRLMRPHGEVIERYCRAFGLARRTSLSDCLSPLLQVSQTVNGFDFPRQALPPHFHALGPLRQPLPMAAGLEWPLDRARPFVFASLGTLQGHRYGLLRNIARACRRLDVQLLIAHCGGLDAAAAARLRQEGACWVTDFAPQRAVLAQASAVVTHAGLNTVLDALEAGVPMLALPIAFDQPGVAARIEHAGVGLRLLPALASPARIAHALRRLLDEASFRQRAAALGEEVRQAGGAARAAELIESALGCVRPRSEVADDA

SEQ ID NO: 9152 - protein, 421 aa, Consotaella salsifontis
MAHFALICPPFFSHIRVFEALAGELARRGHRLTFVLNAGAESAVRSNVASVRIVAPGNASQPIEVVIRRAARPRGPLGILRTVSDTARLTDALCRSAPAILREIGADAVIGDQMEPAAGLIAGHLGLPLASLACALPINPEPQIPLPFLPWSYDPSPKGVKRNQGGEAVARLLLTRQRRTVAAWAERFGLSPRESLADCLSPLAQITQAVESFDFLRKDKDALRYVGPIRESGGAAAALPFDIDPHRPFVFASLGTLQGHRLGLFKAVARACRELDAQLLVAHCGGLDARQAASVGATWITDFAPQRAVLARADLCVTHGGLNTVLDALEAGVPLLAIPIAFDQPGVASRIAYHGLGSVVSPRLLTARKARHAMKRLLDDDGFRERARAIGRDIAASGGLRLAADIVEEAVLASAPRRGAA

SEQ ID NO: 9153 - protein, 370 aa, Ancylostoma ceylanicum
MLEQYDSCGFGIFRAVGIHNIVWLSATGTYAEQPQTIGVNYPLSYVPNLFAPLGDEMNFLERAQNVLISAVTSLVYSSTRAQQSKIFWRTGDLAFGEDLLSTARSSDSIVANTLPSLDFAMPTSNKMAYIGGFTVQKQPGVLDMFWKEIADSSTRGFILVTFGSIARTMDMPLKMQNNFFTAFSRFPEITFIVKYETANSTVTIPPNVQLTQWIPQAKLMAHPNYLAIITHGGWSSILESINVGKPLVLMPLFAGWLLPSDHGKNSKAVEAKGAAVILDKMNPKTADIMKAITSVTTNQRYRENCAKLSRMMQDPSPIDHAALLDYQVRRAAKLTRKSFQLSPKECIHSPISSYLEVFIGISIALVTIAS

SEQ ID NO: 9154 - protein, 473 aa, Eumeta japonica
MQIRMIVAGAVLAAFCAAGPAGGARVLALLPHPGRSHFMVFEPLLEELAARGHRVTVVSFFPREPGRALPGYHDISLVGIIDIFQEVIPLSMFEPSPFGLDRFGHLFMLKMLTDWAVKICEKLQHWPPLQPLYENPRGSYDVVIVEMFNSACPLGLAHATGAPIIGITSHQDLTWWTGTFGQFDNPSYVPNVLLPFDQNMTLLERVANTATMAIQKVWFDWACWRETGVVRERLGTATPSLCELRRSLSLELLNTHHSLNGRYERPPSTIEVGGLHLRSTANASLSQDLEAIVSRAEAGVIVFSLGSMVKATTLPKEKREIFLRVFARTPQTVLWKYEDPSSLKDLPPNVHAISWLPQRALLNISDFEIIGSQCNFLPLKYLVFQFSFDFKKRVKTTWCLSQGYTVGEEVDTFFKRKKLRVPWRGCAAALTWCQKRCRIRDFGRLSHRADNTVGAQTVIHHSESTLFEPLTPE

SEQ ID NO: 9155 - protein, 436 aa, Nakamurella multipartita
MTLLVISPDYASHLLPLATLATAWRDAGERVVVASGPATAAITADFGFARTDLRLGRGSNPGVIRAQEQVAGEDDALRGFFAATERGMVPTLQYQADARRADLLWDPVATARRVLAVVDQVRPDHVLVDHLAFSARLALLAGGVPHADVVLGHPTALPVGDEVYGYPPAWPAVFTPDPDDLATLHQRCREVRDGFTAEWNAALAELAPQAPASVDAFTEHAGQVLLNYPAALHDPARTALLPSHAFLGSAVRAQPTPPDIADWLAADPSRPLVYVSFGSFLSVRADVLARVARALAALPVRVALAVGSADRAVLGELPPHWLVREFLPQVALLEHAAVTVTHGGNNSVTEALMAGVPMLVLPFSTDQFAGAAAIVDAGVGIALDPNAASPAELRAALAELLDGDQARVAADLGAGLRERPGRQIAWQALAPAATGN

SEQ ID NO: 9156 - protein, 265 aa, Arthrobacter sp.
MHVAFICLPAAGHVNPTLPVVAELVRRGHRVTYATSAKYAKAVEAAGAVFFPSGEDLAAFLPPRDRSASGSPTPADGGAAPASGGPSPMPGMFAGMPSGMMSGLLDRILKGAREEFPALLARLAEDPPDGVAYDAMTLSGKMAAAKLALPDIALLPSYATNEHFSMRDLMPGPPPPGMVEAWKQVGQRIHDFAAEQGVGHLQFMGGPPASLNISFIPREFQPRERLSTAGSTSWAHALACVATRKPGGPGPRTGRCCSSRWGPPR

SEQ ID NO: 9157 - protein, 528 aa, Cyprinodon variegatus
MKLHLTVLVLLLLGASKFSNGGKILVWYTEASHWINMKPLLETLVDRGHQVTVLIPSASMFMNSSEPSRFQYEPFNITLSVNEMERLFQDFLHFSVYEMQFMSYFDIYVKFIGLLKENMRAFLSMLNGVVKSETIMKKLKDGKHDLLLADPIYPGSELTADMLGIPLVYSLRFSLAHNWERMCGQLPAPPSFVPGAMSKLTDKMDFSERLWNVLFYALQDKVMEQFLWNELDIYYSEIRGKPTSACELMGNADIWLMRTYWDFEFPRPFLPNFKFVGGIHCGPAKPLPEEMETFVQSSGDAGIVVFSLGSMVKNVSIEKANMIASALAQIPQKVLWRYSGERPQTLGSNTKVYDWIPQNDLLGHPKARAFITHGGTNGIYEAIYHGVPMVGIPMFGDQADNMVHMEAKGAAVAVNFNSLTTESLRDAVNTVINEKVYKENAMRLSRIQHNRPMSARDEAVFWIEFTMRNKGAKHLRVQAHQLSWYQYHSLDVLALVTVIALLVTFVFFKICSFVCQKTCGKKIKTKAD

SEQ ID NO: 9158 - protein, 428 aa, Pseudomonas xanthomarina
MTHFAAIAPPFLSHLRAFEAVAWALTQRGHRVTFVQQADVAELLTLPSAGFAAIGAESHPPGSLAAVVRRAAQPGPFGIRRVIADMAASTALFCRESPDVLRSLKVDAVLADQMEPAGALVAEHLGLPFVSIACALPFNREPLVPLPVMPWRYRATDWGEQLNLHSSRVYDRLMRPHAEVIQHYCQAFGLAPRSTLSECLSPLLQISQTVPGFDFPRHQLPANFHAVGPLRRPLENEAELNLPIDPTRPFVFASLGTLQGHRYSLLRNIARACKPLGVQLLIAHCGGLNAAQAARLQDEGAYWVTDFAPQRVALARAAAVITHAGLNTVLDALEAGVPMLALPIAFDQPGVAARIEHAGVGLRLQPQLASPARIGHALQRLLNEGEFRQRAAQLGAEVREAGGAVRAAELIEAALGTDGQRLEVASGA

SEQ ID NO: 9159 - protein, 410 aa, Bacteroides fragilis
MKHLYIIDQCSSASLYGIGTYIQQIINIWRMDVCSALTIVKLESGTNVIEEGWSDGVRYLWFPSETEEEEMRHESYCLDLAESLRFCMNEEEDNIFLVNYLSHSELILNLKKIISSCRIIIVIHYVGWYTMKRRNGSYLECLLGKVSTDRDATEKIVYKEFVANKDFFLKADRVVCLSEHTYNLLRNVYGIVEQKIRLLYNGLVDEARILDIEQRKIQKGNLSFKVEDQIILYVGRLNQIKGVYYLINAFRKLLDCLPNVHLLVVGDGDYSAYLSECEGIWSHVTFTGRIRKEKLYQLYQISDIGVLPSLQEQCSYVAIEMMMHGIPLIGTASTGLEDMIQEGLNGYAISIEDVDAYPEVFIEKLKSSMVRILSLSIDEKNAMRQQSRNVYLKHYTLNVMQEGMKELEWI

SEQ ID NO: 9160 - protein, 529 aa, Sorangium cellulosum
MTMDAILPLSDHRSDRAPHEAIAPARHTPSTGPARGGLSSVRVQAAIPENPFAALSGANGRPLKVAILSDFTRIPYANGAVFQTRALYRALNTCGHQATLIGPRDPDASADEIPPGTVALPSLPLRTYPGVHLPIPVGSSVLDPMRWDFDICFAQTTTLLVEFGIWLRKMRGIPLLCVNTTHLAAAYDVLLPERVSRIGAVHTVLHKTLRAPMERLFVDLYNQGDGLVVLSEGLRDYWRERGVTVPIHVIPRMVPEDVFERPLGPDPYVQLLEERGLDPRGPRLVCAGRHTREKSQHRLIRIFAEHIAPHEPQATLTLVGDGPDSAAYAALARELGVARRVIFTGEVPYSQISDYYRHANLFLHASLSETFGNVLSEALWCGSPTVAFADGMGVSSQIQSGHNGLLIDPGRGPIAEESANAAFGKAVLALTRDPLAAARLGSAAAQRARERSSPLVVQRMLANAFAHAREHARQSNLRPLVDGPKALQWLETFRHFRTWMGFTGGLFAFGHLRPAAAPRPKGIQPSFCA

SEQ ID NO: 9161 - protein, 365 aa, Unknown
  Description of Unknown: Halobacteriales archaeon SW_5_68_122 sequence
MQTVSVFTDTYLPTVNGVTYTVRTWRDRWERRDGLMPVVYPDDDEYDPGTREFPVSSVAFPFYPGFRFGRPGIPDGVRELSPDVIHAHTPFTLGLSARRLAREAGLPLVASYHTPAREYAGYISNSFAGAISRVADRYERWFFGEADAVVVPSETAADRVATDGTPTYVISNGVDTERFAPADPEAVAAFRDRHGLPAGPLVGYTGRHGYEKCLEDLLAASVGLNATVVLAGDGPARPELRRRAAARDDIVFLGFLDRKELASFYSALDVFAFPSPIETQGLVALEAIACGTPVVGVDSGALSESVVNGETGYHFPRDDVGAFRAAMQRALAERAALSERCLAIRPELSVERSIERLAAVYDDLC

SEQ ID NO: 9162 - protein, 529 aa, Sorangium cellulosum
MSIDVIQPIGEHRGERAQHAASAPARPVPSTGSARGGSSSVKAPAAIPENPFAALSGANGRPLKVAILSDFTRIPYANGAVFQTRALYRALNTCGHQATLIGPRDPDATADEMPPGTIALPSLPLRTYPGVHLPIPMESSVFDPMRWDFDICFAQTTTLLVEFGIWLRKMRGIPLLCVNTTHLAAAYDVLLPERVSRIGAVHTVLHKTLRAPMERLFVDLYNQGDGLVVLSEGLRDYWRERGVTVPIHVIPRMVPEDIFERPLGPDPYAPLLEKRGLDPRGPRLVCAGRHTREKSQHRLIRIFAEHIAPREPNATLTLVGDGPDSAAYAALARELGVERRVILTGEVPYNRMGDYYRHANVFLHASLSETFGNVLSEALWCGSPTVAFADGMGVSSQIQSGHNGLLLDPGRGVAAEERANAAFADAVIGLVRDPAAAARLGSGAAQRARERSSPIVVQRMLASAFVNAREHAAQSGIRPLVEGPKALQWLETFRHFRTWVGFTGGLFAFGHLRPAAAPRPKGIQPSFCT

SEQ ID NO: 9163 - protein, 353 aa, Unknown
  Description of Unknown: uncultured bacterium sequence
MLENTKKKRLNIAIITNNYTPYSGGVVSSIDSFVNELHKQEHKAFIITLDFLGITRNDPYHVIRIPSLFRFMYKKNHMALAIKKEKKLQEIIDILKPDIIHVQHPFYLCQPAAKIAKKLNIPVIFTYHTIYEKYLHYLPLPQFITRPIVKKIVLSFCRNVDYIVSPSSYIKNYLESNNIETKIEKIPSGILPIFIKDQVYAIERTETTEKNGKNIFNLIFVSRFVKEKNIEFLLCMFAKLVQKNPDKNFKLTLAGYGSEYEKIKKFAHKKLKLTNYIQFIYRPRKEDIADLYMQSDAFIFSSDSDTQGLVLAEAMGCGCPVIALDGPGQRDIIKDCINGFLCNFESDMIEKIL

SEQ ID NO: 9164 - protein, 397 aa, Clostridium tunisiense
MKILLTTDTYYPMINGVVISTSNLYKELKEKGHQVRILTLSHTGEERTEGDIYYLKSLKINVYPDARIKVPFYNKLIKEIIEWHPDIVHSQTEFSTMIVAKHIAKKLDIPQVHTYHTMYEDYLGYILGGKVIRKGGAAKVTKFILDSVDEVIAPTDKTKTALREYGLHCPINIIPTGIDLGRFQKNVTQDEKEQLLLKLGLSDQDKIMTYVGRIAEEKNIDEIIGHFPEILEKVPKAKLLIVGAGPHLEVLKELAKEKALEESIIFTGMVEPTEVYKYYKIADVFVTASTSETQGLTYIEALSCGCPIVCRYDKAIDGVILQGTNGFSYKNSWEFILYASEVLANDELKEELSRKAMSKANEYSSKTFAGRVEDLYVKAVSYGETYNSGVRASGLNY

SEQ ID NO: 9165 - protein, 403 aa, Unknown
  Description of Unknown: archaeon GW2011_AR3 sequence
MRIAIFTDTFYPNVDGVSIAIANCVEILARKGHEILIVAPDYGLSKEMNLAKNVTVQRIFSVSMPTYRSFRFVFPLYGKCLQSVRSFKPDIIHIETYSTLGYLGARIAKKLGLPLVGTYHTLASEFVKYLSPLNLFGINGLIENIIPHKMSQTLPPKKDGFMKRTIWRTTIRLYNKCNLVVTPSPSIKGELESRGLKKPILPISNGIKVEIFANKRKFPKKPRKILYVGRVSYEKRVDLVIFAFSHVIKSVPDAHLTIIGQGPALGSIKILSEKLGLSKNVSFIAFMKQEMLGGYYRQSDIFMTASPMETQGLVLIEAMSCGLPCIGVDRFAVPDVIHHGINGYVARQNYAQEMAQYAVRLLCSSGLYAKASKAARQEALKHNLKKCVEKLEKVYLGLAPIKH

SEQ ID NO: 9166 - protein, 517 aa, Anopheles sinensis
MAILQTVLLVALAVSPLAQAYKVLGLFPHPGQSHFHFFQPILKGLAEAGHEVTVVSHFPEKNPPPNYSDIPLEGMMSLSDSVSFELFEYRPGFGHFMEFFMLYNWGKEACANALNSSAIQTVLDSKVQYDLILVEQFNSDCMLGIAHQLKAPFIGLSSCPLMPWHYERVGNPTLPAYVPALFMGYTERMDFSQRLANWITVQSFKALYSWFNDAAANKLLRARFGEGAIPDVRELQQRTAMMFVNQHYSLSGAKPLSPAVLEVGGIHIQNFQPLDGELQQLLDSADHGVIYISWGSMIRAETLPAEKRDAILKALGRLKQRVIWKWENETLPNQPANVYIRKWLPQREILCHPKVRVFMSHGGLLGSSEAAYCGVPVVATPMYGDQYNNAAALTNRGMGVVLHYEDITTDTVQEALRKALEPVAMESAKRVSFSYRNRPISALESAVWWCEHVAATGGLPLAQSYSSELPWYSYHQFDVYIVTFTFLALYHACWIWLFKRVCCRGVSGFKDEKVKTN

SEQ ID NO: 9167 - protein, 469 aa, Ooceraea biroi
MRALASRGHNVTVVSTIPLKNPPPNYENVDLSFSYRKKDCTGLRHMGAYTLLHKNMEEANELCREQLFSSAIAKLIASNKTFDAVIIEQLWYQCYYALVKHYNFPVLMGFLSVGNLPYVMDSVGNPDDPNMSPDMAYPFTNRMTIDERIWNTLYTTWTRLYYRYWHLSRAQRIANEWALGTSVYDIDKNFSLVILGNNHVFGYPKPLLPNVIEVHSLQISEKFEPLPEDIRAFLDNAQDGAIYFSLGSNLQTHQLPAGPLTALCNALGSLKQRVLWKHDGNMAIHPANIKFVKWAPQQAVLAHPRVMGYVMQGGLQSLQEAVHHSVPVVAIPFFGDQLFNARKILDAGIGLTLDIDSMTEDSVVQTLVEIVENKTYLNNIKTMSAIIRDELVKPMERAVWSVEHVLKFPNSRHLRYHGRDMSWIDYYATFLCLTVCLIVLSYFICILCIKGAGVFVRSKWINDLKQKFD

SEQ ID NO: 9168 - protein, 522 aa, Spodoptera exigua
  MOD_RES (64)..(64): Any amino acid
  MOD_RES (69)..(69): Any amino acid
  MOD_RES (79)..(79): Any amino acid
MADLRSVLFGILLMFCSCEAYKILAIFPVPSTSHGILGDNMIKHLLNAGHEVTYITPFINKKKXDHPNXKIVDVSANAXISCDSLTDIKLIMDGVLDYKDPVLMSQLTIMMASHTLGNPNVQKFLKDPNQQFDVIIGEYMFSDLYSSFQAVFQCPFIWFSTIQPHWAILNMVHGPLNPSYNSDYIIGNVAPFTFKERVYELWVQLKGLYYHKYVNLGAEEKVYLEHIAPIVKAQGKPVPNYEELKYNASLVLGNSQVVFGNAVPLPPNYKHIGGYHIDEDVKTLPEDLQKLMDNAKNGIIYFSLGSNIRSKDLPDSMKDGLLEMFGKLKQTVIWKFEKSLDNTPKNVHIVQWAPQQSMLAHPNLVLFITHGGLLSVTEAVYFGKPLVAIPVFADQFLNANSFQKMGAAVKVDLTYNLHKGLEVALNKVLPELPKYTARMKEISVAYHDRPMKPKEALNFWVEHVVRTRGATHLRSVALQVPLYQQAYLDLLAVLLAAAVAILLVVRRILSLFTSDGRKLKKN

SEQ ID NO: 9169 - protein, 463 aa, Papilio machaon
MLHFSLCLLLLVGSILNIESSRILAVYPCPSISHQIVFRPLTLELLKLGHELTVVTTDPMFSKENAPANLTEINVHDTTYGVIRKIISNAVTGSKTDLLNQALVVKELIYDATEAILQTNDVQNMLKNEKRYDLIFIEALFTPMLGLSHKFKAPTILVSSFGPFIGSYEIIGAPTKALLYHNMYSQRLHNLTLIEKISELYNYVRIQYIFNYSDEKLNELLKRLFGSDTPTLSKLKDYVDMLFVNTHHVWEGNYPVPPTVIHMGGLHQKPQKPLPEDLQQYLDSSENGVIYFSFGTNVNISNLPQEKIMIFKKVLSELPYNVLWKIEDDNLPGKSKNIKTFKWLPQADLLSIEDSLKNAILKVIEDKSYRDNIVRLRSLIQDQPQTPLERAIWWTEYVLRHGGAKHLRAPAANLSSTEYYEMELCLLISSVTLISAVLLFILIRLVVANVSKIIIPKQKLKSM

SEQ ID NO: 9170 - protein, 1023 aa, Anopheles gambiae
EQTAACTMLRTVILVALALSQGTEAYKVLGLFPHPGQSHFHFFQPVLKGLAEAGHEVTVVSHFPEKNPPANYHDLPLAGMTSLSDSVSFELFEYRPGFGHFMEFFMLYTWGKEACANALNSTAIQTVLDSKVQYDLILVEQFNSDCMLGIAHQLKAPYIGLSSCPLMPWHYERVGNPTLPAYIPALFMGYTERMDFSQRLANWITVQSFKALYSWFNDAAANKLLGERFGQGAIPDVRELQQRTAMMFVNQHYSLSGAKPLSPAVLEIGGIHIRDFRPLEADLQQLLDTADHGVIYISWGSMIRAETLPAEKRDAILKALGRFKQRVIWKWENETLPNQPSNVHIRKWLPQREILCHPKVRVFMSHGGLLGSSEAAYCGVPVVATPMYGDQYNNAAALANRGMGVVLAYEDITADSVYDALRKVLEPEAMEHAKQVSFSYRNRPQSPLESAVWWCEHVAATGGLPLAQSYSSELPWYSYHQFDVYIVTITFLILLIVLAIGSSSHGYRILGLFPHPGLSHFKVFHPIMRGLANDGHHVTVLSYFPDSDPVPNYHDLRFEGQEVLTNTFSLQDFTGRTFIDNFHEFHELVVWGMDSCKAALDSPAIDQILEAHRVAPFDLVVMEVFATDCMAGISWLLQVPLVGLSSCAIMPWHYDRVGLPDTPSYIPSEFSTFSEEMSFWQRFENWLVTRVVKHLYRIVQISDNRLLKEKFPNAAIPDVAEIVQNTSLILINQHYTLSGARPLVPAVVEIGGVHIQGEKPLPTKLQQIMDQSSNGVIVVSFGSVLKAATLPTAKRNAMLEAFERFDQQVVWKWEDELDNPPKNLYTQKWLPQRDVLCHKNVRLFVSHGGLLGVSEAVHCGVPVVVMPIYGDQFLNAAALVNRGAGVRMDYELVDNVTYIASCIGEGLSDRKRRMAQSLSRAYKTRPQIPLDLARWSIINVIENGAMEYERSYAPKLPWYIYYSLDVILVLLFAALTLVFGERLDPVAGFSVDSANHTHCTEGQNHADTPPKCTRKTRANRSYF

SEQ ID NO: 9171 - protein, 416 aa, Unknown
  Description of Unknown: Xanthomonadales bacterium sequence
MHVLMVSDVCFPRVNGVSTSIGTFRDSLTRQGHRCTVVAPDYGLRGVDTHVQRVPARPVPFDPEDRLMIPRRLRSVLERLDPGDVDVVHLQTPFVAHAVGLRWARRHGLPVLETCHTHFEEYFHHYLPLLPAGWLRAAARTLTRRQCNALDAVIVPSLAMRDVLAGYGVRSPVHVLPTGIDPSAFGHGDGAAFRRRHGLAADRPVLVHVGRIAHEKNLDLLLDVTHLLRRAIPDVVLLVAGDGPALGHCRARVQSLGLEAHVRFVGYLDRGGELQDCYRAGDLFVFASKTETQGLVMLEALALGVPVVAIPALGARDIVEPGRGAVPAPDDASAYAAIVAGLLRDPGRRAYLADEAVRFAREWDSTTVARRLVDVYAEVGVSRPRAPVNHAVAALHAADERNEPAQGVGSGAGPDH

SEQ ID NO: 9172 - protein, 322 aa, Enterococcus faecalis
MKIGFFTDTYFPQVSGVATSIKTLKDELEKHGHEVYIFTTTDPNATDFEEDVIRMPSVPFVSFKDRRVVVRGMWYAYLIAKELELDLIHTHTEFGAGILGKMVGKKMKIPVIHTYHTMYEDYLHYIAKGKVVRPSHVKFFSRVFTNHTTGVVCPSERVIEKLRDYGVTAPMRIIPTGIEIDKFLRPDITEEMIAGMRQQLGIEEQQIMLLSLSRISYEKNIQAIIQGLPQIIEKLPQTRLVIVGNGPYLEDLKELAEELEVSEYVQFTGEVPNEEVAIYYKAADYFVSASTSETQGLTYTEAMAAGVQCVAEGNAYLNNLFD

SEQ ID NO: 9173 - protein, 411 aa, Flagellimonas maritima
MKKTIVLLSALEPWSMKTGAGAPSLYETIKGYSDNGFQITYITYQKYVQKLNISHSQNIDLDLPGLNTLRVKKIKGPIFFGPRFLGKLNRLYYEPKTLLNALEDYLNNLEETPSILYAYEAQAVHAISMLKRKYKDKSIVVNRFQGTILGNRYREYFYCLRKYEMFRILRNKADKYIMTNDGTHGDEALKYWNANVNDNNLLFIRNGFNFQSFQKTKSRTATIGELGLDPKNFYAFTVSRLTYWKRVDRAIGLIEKFAKKHPKLHLIVVGEGEHKLDLIELAESKGVSDKVHFIGAQSREKVAELMQALDVFLSLYDVSNLGNPLFEAMICGQCIITLDNGTTKEVIEHNKNGIIVSPDNKSDLQKEFETLLMNEEKRIRLKKTAKAWAERNLQSWSNRMKKEIDWIQNGP

SEQ ID NO: 9174 - protein, 400 aa, Faecalicatena orotica
MRIALFSETYLPQINGVATHVKTLKEGMEALGHQVLVVTADPKAEVCHMKEGVLRCPAAELKDLYGYGMAPSYNLERMRLIQAFSPDIAHTHTEFGIGSTGLETARKLKIPFIYTLHTMWDDYLHYVASPTLQPVVRKMIHRYLRYFASQADAIIGPSVKSRDFLHHCGVKREIEVIPNAVELEQFSRDRTDPVTVKMLRQFYNIQNDDTVICFCGRLGQEKSVDVLIRFFAQCRQKEAHLKLLLIGDGPALSELKELTRRLNAGSAVIFTGAVPHESVREVYACSDLYATASRSEVNSISMLEAMSMGLPVLQRLDEANPGQVTVGVNGYVFRTAEEFSAILLRFRNSSHVGQARMQASTANSVKGLHPTGLARQMEAIYLRLATCRPASLNAWKEEVK

SEQ ID NO: 9175 - protein, 402 aa, Chrysanthemum yellows
MKIGFFTDTYLPIIGGIPISVKSHKDSLEKLGHKVYIITPQGPKNYEEKDASIIRIKGIPIPFKGIEGHRVVLRFKKYLSLVKDLNLDIIHIHTEFPMGKLGIYASQKLNIPSVYTMNTMHEYFFNKSKNIGIKIFKLFFILANRKALKKFFSKTHSTIVPTHKILTLLEKDYNIKGKYNVVPTGINLEQFYSQNHSLEEIQALKVKFNLVNDFVCLYVGRLSPEKDISYLISAFASFCQNHPQSKFVIVGDGPEKKALQKQVKQLQIENNVLFLGFVPYDNLVIYYQLGNCFLSASLFETQGLTFVEAMASSLVLLARHDQALDGLIDNGNNGFFYHQKEELINYLSLLYNDNKKTKTMSMNAKNSILNYDQTSFASKMIQIYKEAIKTNKENNNQNNNHN

SEQ ID NO: 9176 - protein, 397 aa, Friedmanniella luteola
MRILLGADQYPEYINGAATFTARLAGGLAARGHTVDLVWPSVDGRPHYGFDAGVRVHRVSSLRLPTSAAIRTSTPWAVSREVRAILGFARPDVVHVQSHFALGRALVRSAKAAGLPVLATNHFMPENLTHHVPLLRHASRPAARAAWNDLARVYRAADAITAPTERAVQLLAAATDLPRAEAVSCGIDLDRFRPAGPASVEPATLLFVGRLEQEKHVDDLLRAFARVPVTQGARLEVVGMGSQRAELEALARQLALAGRVLFRGAVSDDELLRAYQRATVFVMPGTAELQSLATLEAMAAGCPVVAADAMALPHLVGHGDNGYLVRPGDLPGLADALGALLADAPLRRRMGAASRARAARHQLTATLTAFEDRYAALSGLPLPTRVAPADAELLLAS

SEQ ID NO: 9177 - protein, 365 aa, Serratia plymuthica
MRILMIIDGLPGGGAEKVVLTLCQGMQELGNDVSLISLRDVCNYPIPAGVHYQVVADHSRTPWRKLTELSRRATALDRVIADNERRQGAYDLVFSNLHKTDRIVSRSKLLSSDRLWFCIHGMLSTSYLGHRKGMDRWLKQRKIADVYQGQNIVAVSQAVGDDLQQNLPIHPNRLAVINNPFDIAAIEQQAAEPCELAGQEYLVHVGRFHPHKRHDRLLKAYAQSGIQAPLALIGTGSEANVGEVKQLANQLGIADRVLFLGFQANPYPFIRHASLLVLSSDSEGFGNVLVEALLCGTPVVSTRCPGGPAEILEKAGMDNALADLNEKSLAEKMAKIHAQPPEINHQQLLSYGLKSICQRYLALKK

SEQ ID NO: 9178 - protein, 237 aa, Saliniradius amylolyticus
MIADQIVVVSKWWQNRIEKVYPELKDKIVVNQNGLSPVFLAKAMKEAHTPDSPSETVRVITMTRLLKKKGVQRVIEAMRFLPPEFHLSIAGTGPYVGELQKLSIKLQLESRIRFLGWLNEDEKIQQMKSHDVFAMPSEYDSFGMVFIEAMACGLPVVTTPSGPITDIVTNGIDGIIARSTDGEDIARAIEKAYQNCVSMADNARNNVSDNFRVESGARELVSLFSRMSGKSVDGQKN

SEQ ID NO: 9179 - protein, 363 aa, Halococcus morrhuae
MPPHVAAFTDTYLPTVNGVTYTIRTWHERWQRRDGRMDVVYPGADGHDPTPDEHPVRSLPFPFYENFRVGVPSVPDAVANADIVHAHTPFGLGLGGLRLAHDIDQPLVASYHTPTAEYAGYLAEGWLLDAVARVGNAYERWFLGRADHIVVPSETVRTALVNRGIGPVSVVSNGVDTDRFAPTDTADFRTRHDLPDGPLVGYTGRHGFEKELADLVATAEGMDATFVLAGDGPARKTLQEEANEIDADVRFLGFLDREELPQFYSALDVFGFPSPVETQGLVALEAMACGTPVVGVDSGALTETIDDGETGYHYEQGDIGAFRDALGRALADDELPATCRSRRESMSVEHSVDALASVYDTVL

SEQ ID NO: 9180 - protein, 350 aa, Vibrio parahaemolyticus
MKTKILHIINDLSQNGGAQKFLVDLVLEHNPEYEIKILVLCAENDYLEQLSAQGIQCFNWQTLSLSEKWSLLRWPDLVHGHLYPSIYLALLAIGKKRIQTEHCSYNRRRDYPLLKFIEYVLYWGHHYTVSISEKVQEELVKFMPRYQHKYRVVHNGVDLNRFPMTAKQAHNLSEKATINIGMVGRLHEHKDHETLIHAIAKLPECYHLHLAGDGDRKASLQRLAQSLNVLSRVHFHGVVSDIPLFLSDMDIYVQSSHVEGFGLAAVEAMAAGLPVLSSDVPGLNEVTGSSEYLFEVGDSNRLAQKVAELCEDAALYNSASHYSVNRAKLYTIDKFREGYYGIYQQLCTDK

SEQ ID NO: 9181 - protein, 332 aa, Unknown
  Description of Unknown: Actinobacteria bacterium sequence
NELVRRGHDVTLFAAGDSRTSARLVPVVDSPLWHHDPPYQDFAPFWAVVLDVLVDCWHEFDVIHSHLDYLAFPLARFAPCPLVTTLHGRLDLPELECLYGRFNDIPIVSISDAQRQPVPHANWVATAHHGVEVEEYTFDPVGGEYLAFLGRISPEKGLETAIAAARKSGLPLKVAAREPLPHDGDPSAQRDWEYYEREICPLLKAGDVEMIGPVRHADKNRLLGGAAALLFPIRWPEPFGLVMIEALACGTPVLAFNNGSVPEVLQHGVTGFICDSEDELVKNASRIRQIDRMRCRAEAEQRFSAEAMANQYERVYDSLLADAGPRAARRVV

SEQ ID NO: 9182 - DNA, 1509 bp, Homo sapiens
atggctttgattcctgatttggctatggaaactagattgttgttggctgtttcattggttttgttgtatttgtatggaactcattcacatggattgtttaaaaaattgggaattcctggacctactcctttgccttttttgggaaatattttgtcatatcataaaggattttgcatgtttgatatggaatgccataaaaaatatggaaaagtttggggattttatgatggacaacaacctgttttggctattactgatcctgatatgattaaaactgttttggttaaagaatgctattcagtttttactaatagaagaccttttggacctgttggatttatgaaatcagctatttcaattgctgaagatgaagaatggaaaagattgagatcattgttgtcacctacttttacttcaggaaaattgaaagaaatggttcctattattgctcaatatggagatgttttggttagaaatttgagaagagaagctgaaactggaaaacctgttactttgaaagatgtttttggagcttattcaatggatgttattacttcaacttcatttggagttaatattgattcattgaataatcctcaagatccttttgttgaaaatactaaaaaattgttgagatttgattttttggatcctttttttttgtcaattactgtttttccttttttgattcctattttggaagttttgaatatttgcgtttttcctagagaagttactaattttttgagaaaatcagttaaaagaatgaaagaatcaagattggaagatactcaaaaacatagagttgattttttgcaattgatgattgattcacaaaattcaaaagaaactgaatcacataaagctttgtcagatttggaattggttgctcaatcaattatttttatttttgctggatgcgaaactacttcatcagttttgtcatttattatgtatgaattggctactcatcctgatgttcaacaaaaattgcaagaagaaattgatgctgttttgcctaataaagctcctcctacttatgatactgttttgcaaatggaatatttggatatggttgttaatgaaactttgagattgtttcctattgctatgagattggaaagagtttgcaaaaaagatgttgaaattaatggaatgtttattcctaaaggagttgttgttatgattccttcatatgctttgcatagagatcctaaatattggactgaacctgaaaaatttttgcctgaaagattttcaaaaaaaaataaagataatattgatccttatatttatactccttttggatcaggacctagaaattgcattggaatgagatttgctttgatgaatatgaaattggctttgattagagttttgcaaaatttttcatttaaaccttgcaaagaaactcaaattcctttgaaattgtcattgggaggattgttgcaacctgaaaaacctgttgttttgaaagttgaatcaagagatggaactgtttcaggagct

SEQ ID NO: 9183 - protein, 503 aa, Homo sapiens
MALIPDLAMETRLLLAVSLVLLYLYGTHSHGLFKKLGIPGPTPLPFLGNILSYHKGFCMFDMECHKKYGKVWGFYDGQQPVLAITDPDMIKTVLVKECYSVFTNRRPFGPVGFMKSAISIAEDEEWKRLRSLLSPTFTSGKLKEMVPIIAQYGDVLVRNLRREAETGKPVTLKDVFGAYSMDVITSTSFGVNIDSLNNPQDPFVENTKKLLRFDFLDPFFLSITVFPFLIPILEVLNICVFPREVTNFLRKSVKRMKESRLEDTQKHRVDFLQLMIDSQNSKETESHKALSDLELVAQSIIFIFAGCETTSSVLSFIMYELATHPDVQQKLQEEIDAVLPNKAPPTYDTVLQMEYLDMVVNETLRLFPIAMRLERVCKKDVEINGMFIPKGVVVMIPSYALHRDPKYWTEPEKFLPERFSKKNKDNIDPYIYTPFGSGPRNCIGMRFALMNMKLALIRVLQNFSFKPCKETQIPLKLSLGGLLQPEKPVVLKVESRDGTVSGA

SEQ ID NO: 9184 - DNA, 2040 bp, Homo sapiens
atgattaatatgggagattcacatgttgatacttcatcaactgtttcagaagctgttgctgaagaagtttcattgttttcaatgactgatatgattttgttttcattgattgttggattgttgacttattggtttttgtttagaaaaaaaaaagaagaagttcctgaatttactaaaattcaaactttgacttcatcagttagagaatcatcatttgttgaaaaaatgaaaaaaactggaagaaatattattgttttttatggatcacaaactggaactgctgaagaatttgctaatagattgtcaaaagatgctcatagatatggaatgagaggaatgtcagctgatcctgaagaatatgatttggctgatttgtcatcattgcctgaaattgataatgctttggttgttttttgcatggctacttatggagaaggagatcctactgataatgctcaagatttttatgattggttgcaagaaactgatgttgatttgtcaggagttaaatttgctgtttttggattgggaaataaaacttatgaacattttaatgctatgggaaaatatgttgataaaagattggaacaattgggagctcaaagaatttttgaattgggattgggagatgatgatggaaatttggaagaagattttattacttggagagaacaattttggttggctgtttgcgaacattttggagttgaagctactggagaagaatcatcaattagacaatatgaattggttgttcatactgatattgatgctgctaaagtttatatgggagaaatgggaagattgaaatcatatgaaaatcaaaaacctccttttgatgctaaaaatccttttttggctgctgttactactaatagaaaattgaatcaaggaactgaaagacatttgatgcatttggaattggatatttcagattcaaaaattagatatgaatcaggagatcatgttgctgtttatcctgctaatgattcagctttggttaatcaattgggaaaaattttgggagctgatttggatgttgttatgtcattgaataatttggatgaagaatcaaataaaaaacatccttttccttgccctacttcatatagaactgctttgacttattatttggatattactaatcctcctagaactaatgttttgtatgaattggctcaatatgcttcagaaccttcagaacaagaattgttgagaaaaatggcttcatcatcaggagaaggaaaagaattgtatttgtcatgggttgttgaagctagaagacatattttggctattttgcaagattgcccttcattgagacctcctattgatcatttgtgcgaattgttgcctagattgcaagctagatattattcaattgcttcatcatcaaaagttcatcctaattcagttcatatttgcgctgttgttgttgaatatgaaactaaagctggaagaattaataaaggagttgctactaattggttgagagctaaagaacctgttggagaaaatggaggaagagctttggttcctatgtttgttagaaaatcacaatttagattgccttttaaagctactactcctgttattatggttggacctggaactggagttgctccttttattggatttattcaagaaagagcttggttgagacaacaaggaaaagaagttggagaaactttgttgtattatggatgcagaagatcagatgaagattatttgtatagagaagaattggctcaatttcatagagatggagctttgactcaattgaatgttgctttttcaagagaacaatcacataaagtttatgttcaacatttgttgaaacaagatagagaacatttgtggaaattgattgaaggaggagctcatatttatgtttgcggagatgctagaaatatggctagagatgttcaaaatactttttatgatattgttgctgaattgggagctatggaacatgctcaagctgttgattatattaaaaaattgatgactaaaggaagatattcattggatgtttggtca

SEQ ID NO: 9185 - protein, 680 aa, Homo sapiens
MINMGDSHVDTSSTVSEAVAEEVSLFSMTDMILFSLIVGLLTYWFLFRKKKEEVPEFTKIQTLTSSVRESSFVEKMKKTGRNIIVFYGSQTGTAEEFANRLSKDAHRYGMRGMSADPEEYDLADLSSLPEIDNALVVFCMATYGEGDPTDNAQDFYDWLQETDVDLSGVKFAVFGLGNKTYEHFNAMGKYVDKRLEQLGAQRIFELGLGDDDGNLEEDFITWREQFWLAVCEHFGVEATGEESSIRQYELVVHTDIDAAKVYMGEMGRLKSYENQKPPFDAKNPFLAAVTTNRKLNQGTERHLMHLELDISDSKIRYESGDHVAVYPANDSALVNQLGKILGADLDVVMSLNNLDEESNKKHPFPCPTSYRTALTYYLDITNPPRTNVLYELAQYASEPSEQELLRKMASSSGEGKELYLSWVVEARRHILAILQDCPSLRPPIDHLCELLPRLQARYYSIASSSKVHPNSVHICAVVVEYETKAGRINKGVATNWLRAKEPVGENGGRALVPMFVRKSQFRLPFKATTPVIMVGPGTGVAPFIGFIQERAWLRQQGKEVGETLLYYGCRRSDEDYLYREELAQFHRDGALTQLNVAFSREQSHKVYVQHLLKQDREHLWKLIEGGAHIYVCGDARNMARDVQNTFYDIVAELGAMEHAQAVDYIKKLMTKGRYSLDVWS

SEQ ID NO: 9186 - DNA, 1554 bp, Cannabis sativa
atgaatcctcgagaaaacttccttaaatgcttctcgcaatatattcccaataatgcaacaaatctaaaactcgtatacactcaaaacaacccattgtatatgtctgtcctaaattcgacaatacacaatcttagattcacctctgacacaaccccaaaaccacttgttatcgtcactccttcacatgtctctcatatccaaggcactattctatgctccaagaaagttggcttgcagattcgaactcgaagtggtggtcatgattctgagggcatgtcctacatatctcaagtcccatttgttatagtagacttgagaaacatgcgttcaatcaaaatagatgttcatagccaaactgcatgggttgaagccggagctacccttggagaagtttattattgggttaatgagaaaaatgagaatcttagtttggcggctgggtattgccctactgtttgcgcaggtggacactttggtggaggaggctatggaccattgatgagaaactatggcctcgcggctgataatatcattgatgcacacttagtcaacgttcatggaaaagtgctagatcgaaaatctatgggggaagatctcttttgggctttacgtggtggtggagcagaaagcttcggaatcattgtagcatggaaaattagactggttgctgtcccaaagtctactatgtttagtgttaaaaagatcatggagatacatgagcttgtcaagttagttaacaaatggcaaaatattgcttacaagtatgacaaagatttattactcatgactcacttcataactaggaacattacagataatcaagggaagaataagacagcaatacacacttacttctcttcagttttccttggtggagtggatagtctagtcgacttgatgaacaagagttttcctgagttgggtattaaaaaaacggattgcagacaattgagctggattgatactatcatcttctatagtggtgttgtaaattacgacactgataattttaacaaggaaattttgcttgatagatccgctgggcagaacggtgctttcaagattaagttagactacgttaagaaaccaattccagaatctgtatttgtccaaattttggaaaaattatatgaagaagatataggagctgggatgtatgcgttgtacccttacggtggtataatggatgagatttcagaatcagcaattccattccctcatcgagctggaatcttgtatgagttatggtacatatgtagttgggagaagcaagaagataacgaaaagcatctaaactggattagaaatatttataacttcatgactccttatgtgtccaaaaattcaagattggcatatctcaattatagagaccttgatataggaataaatgatcccaagaatccaaataattacacacaagcacgtatttggggtgagaagtattttggtaaaaattttgacaggctagtaaaagtgaaaaccctggttgatcccaataacttttttagaaacgaacaaagcatcccacctcaaccacggcatcgtcattaa

SEQ ID NO: 9187 - protein, 517 aa, Cannabis sativa
MNPRENFLKCFSQYIPNNATNLKLVYTQNNPLYMSVLNSTIHNLRFTSDTTPKPLVIVTPSHVSHIQGTILCSKKVGLQIRTRSGGHDSEGMSYISQVPFVIVDLRNMRSIKIDVHSQTAWVEAGATLGEVYYWVNEKNENLSLAAGYCPTVCAGGHFGGGGYGPLMRNYGLAADNIIDAHLVNVHGKVLDRKSMGEDLFWALRGGGAESFGIIVAWKIRLVAVPKSTMFSVKKIMEIHELVKLVNKWQNIAYKYDKDLLLMTHFITRNITDNQGKNKTAIHTYFSSVFLGGVDSLVDLMNKSFPELGIKKTDCRQLSWIDTIIFYSGVVNYDTDNFNKEILLDRSAGQNGAFKIKLDYVKKPIPESVFVQILEKLYEEDIGAGMYALYPYGGIMDEISESAIPFPHRAGILYELWYICSWEKQEDNEKHLNWIRNIYNFMTPYVSKNSRLAYLNYRDLDIGINDPKNPNNYTQARIWGEKYFGKNFDRLVKVKTLVDPNNFFRNEQSIPPQPRHRH

SEQ ID NO: 9188 - DNA, 1374 bp, Stevia rebaudiana
atggaaaataaaactgaaactactgttagaagaagaagaagaattattttgtttcctgttccttttcaaggacatattaatcctattttgcaattggctaatgttttgtattcaaaaggattttcaattactatttttcatactaattttaataaacctaaaacttcaaattatcctcattttacttttagatttattttggataatgatcctcaagatgaaagaatttcaaatttgcctactcatggacctttggctggaatgagaattcctattattaatgaacatggagctgatgaattgagaagagaattggaattgttgatgttggcttcagaagaagatgaagaagtttcatgcttgattactgatgctttgtggtattttgctcaatcagttgctgattcattgaatttgagaagattggttttgatgacttcatcattgtttaattttcatgctcatgtttcattgcctcaatttgatgaattgggatatttggatcctgatgataaaactagattggaagaacaagcttcaggatttcctatgttgaaagttaaagatattaaatcagcttattcaaattggcaaattttgaaagaaattttgggaaaaatgattaaacaaactagagcttcatcaggagttatttggaattcatttaaagaattggaagaatcagaattggaaactgttattagagaaattcctgctccttcatttttgattcctttgcctaaacatttgactgcttcatcatcatcattgttggatcatgatagaactgtttttcaatggttggatcaacaacctccttcatcagttttgtatgtttcatttggatcaacttcagaagttgatgaaaaagattttttggaaattgctagaggattggttgattcaaaacaatcatttttgtgggttgttagacctggatttgttaaaggatcaacttgggttgaacctttgcctgatggatttttgggagaaagaggaagaattgttaaatgggttcctcaacaagaagttttggctcatggagctattggagctttttggactcattcaggatggaattcaactttggaatcagtttgcgaaggagttcctatgattttttcagattttggattggatcaacctttgaatgctagatatatgtcagatgttttgaaagttggagtttatttggaaaatggatgggaaagaggagaaattgctaatgctattagaagagttatggttgatgaagaaggagaatatattagacaaaatgctagagttttgaaacaaaaagctgatgtttcattgatgaaaggaggatcatcatatgaatcattggaatcattggtttcatatatttcatcattg

SEQ ID NO: 9189 - protein, 458 aa, Stevia rebaudiana
MENKTETTVRRRRRIILFPVPFQGHINPILQLANVLYSKGFSITIFHTNFNKPKTSNYPHFTFRFILDNDPQDERISNLPTHGPLAGMRIPIINEHGADELRRELELLMLASEEDEEVSCLITDALWYFAQSVADSLNLRRLVLMTSSLFNFHAHVSLPQFDELGYLDPDDKTRLEEQASGFPMLKVKDIKSAYSNWQILKEILGKMIKQTRASSGVIWNSFKELEESELETVIREIPAPSFLIPLPKHLTASSSSLLDHDRTVFQWLDQQPPSSVLYVSFGSTSEVDEKDFLEIARGLVDSKQSFLWVVRPGFVKGSTWVEPLPDGFLGERGRIVKWVPQQEVLAHGAIGAFWTHSGWNSTLESVCEGVPMIFSDFGLDQPLNARYMSDVLKVGVYLENGWERGEIANAIRRVMVDEEGEYIRQNARVLKQKADVSLMKGGSSYESLESLVSYISSL

SEQ ID NO: 9190 - DNA, 1965 bp, Homo sapiens
atgtcatcatcaaatgttgaagtttttattcctgtttcacaaggaaatactaatggatttcctgctactgcttcaaatgatttgaaagcttttactgaaggagctgttttgtcatttcataatatttgctatagagttaaattgaaatcaggatttttgccttgcagaaaacctgttgaaaaagaaattttgtcaaatattaatggaattatgaaacctggattgaatgctattttgggacctactggaggaggaaaatcatcattgttggatgttttggctgctagaaaagatccttcaggattgtcaggagatgttttgattaatggagctcctagacctgctaattttaaatgcaattcaggatatgttgttcaagatgatgttgttatgggaactttgactgttagagaaaatttgcaattttcagctgctttgagattggctactactatgactaatcatgaaaaaaatgaaagaattaatagagttattcaagaattgggattggataaagttgctgattcaaaagttggaactcaatttattagaggagtttcaggaggagaaagaaaaagaacttcaattggaatggaattgattactgatccttcaattttgtttttggatgaacctactactggattggattcatcaactgctaatgctgttttgttgttgttgaaaagaatgtcaaaacaaggaagaactattattttttcaattcatcaacctagatattcaatttttaaattgtttgattcattgactttgttggcttcaggaagattgatgtttcatggacctgctcaagaagctttgggatattttgaatcagctggatatcattgcgaagcttataataatcctgctgatttttttttggatattattaatggagattcaactgctgttgctttgaatagagaagaagattttaaagctactgaaattattgaaccttcaaaacaagataaacctttgattgaaaaattggctgaaatttatgttaattcatcattttataaagaaactaaagctgaattgcatcaattgtcaggaggagaaaaaaaaaaaaaaattactgtttttaaagaaatttcatatactacttcattttgccatcaattgagatgggtttcaaaaagatcatttaaaaatttgttgggaaatcctcaagcttcaattgctcaaattattgttactgttgttttgggattggttattggagctatttattttggattgaaaaatgattcaactggaattcaaaatagagctggagttttgttttttttgactactaatcaatgcttttcatcagtttcagctgttgaattgtttgttgttgaaaaaaaattgtttattcatgaatatatttcaggatattatagagtttcatcatattttttgggaaaattgttgtcagatttgttgcctatgagaatgttgccttcaattatttttacttgcattgtttattttatgttgggattgaaagctaaagctgatgctttttttgttatgatgtttactttgatgatggttgcttattcagcttcatcaatggctttggctattgctgctggacaatcagttgtttcagttgctactttgttgatgactatttgctttgtttttatgatgattttttcaggattgttggttaatttgactactattgcttcatggttgtcatggttgcaatatttttcaattcctagatatggatttactgctttgcaacataatgaatttttgggacaaaatttttgccctggattgaatgctactggaaataatccttgcaattatgctacttgcactggagaagaatatttggttaaacaaggaattgatttgtcaccttggggattgtggaaaaatcatgttgctttggcttgcatgattgttatttttttgactattgcttatttgaaattgttgtttttgaaaaaatattca

SEQ ID NO: 9191 - protein, 655 aa, Homo sapiens [sequence omitted]

SEQ ID NO: 9192 - DNA, 1074 bp, Cannabis sativa
atgaagaagaacaaatcaactagtaataataagaacaacaacagtaataatatcatcaaaaacgacatcgtatcatcatcatcatcaacaacaacaacatcatcaacaactacagcaacatcatcatttcataatgagaaagttactgtcagtactgatcatattattaatcttgatgataagcagaaacgacaattatgtcgttgtcgtttagaaaaagaagaagaagaagaaggaagtggtggttgtggtgagacagtagtaatgatgctagggtcagtatctcctgctgctgctactgctgctgcagctgggggctcatcaagttgtgatgaagacatgttgggtggtcatgatcaactgttgttgttgtgttgttctgagaaaaaaacgacagaaatttcatcagtggtgaactttaataataataataataataataaggaaaatggtgacgaagtttcaggaccgtacgattatcatcatcataaagaagaggaagaagaagaagaagaagatgaagcatctgcatcagtagcagctgttgatgaagggatgttgttgtgctttgatgacataatagatagccacttgctaaatccaaatgaggttttgactttaagagaagatagccataatgaaggtggggcagctgatcagattgacaagactacttgtaataatactactattactactaatgatgattataacaataacttgatgatgttgagctgcaataataacggagattatgttattagtgatgatcatgatgatcagtactggatagacgacgtcgttggagttgacttttggagttgggagagttcgactactactgttattacccaagaacaagaacaagaacaagatcaagttcaagaacagaagaatatgtgggataatgagaaagagaaactgttgtctttgctatgggataatagtgataacagcagcagttgggagttacaagataaaagcaataataataataataataatgttcctaacaaatgtcaagagattacctctgataaagaaaatgctatggttgcatggcttctctcctga

SEQ ID NO: 9193 - protein, 357 aa, Cannabis sativa
MKKNKSTSNNKNNNSNNIIKNDIVSSSSSTTTTSSTTTATSSFHNEKVTVSTDHIINLDDKQKRQLCRCRLEKEEEEEGSGGCGETVVMMLGSVSPAAATAAAAGGSSSCDEDMLGGHDQLLLLCCSEKKTTEISSVVNFNNNNNNNKENGDEVSGPYDYHHHKEEEEEEEEDEASASVAAVDEGMLLCFDDIIDSHLLNPNEVLTLREDSHNEGGAADQIDKTTCNNTTITTNDDYNNNLMMLSCNNNGDYVISDDHDDQYWIDDVVGVDFWSWESSTTTVITQEQEQEQDQVQEQKNMWDNEKEKLLSLLWDNSDNSSSWELQDKSNNNNNNNVPNKCQEITSDKENAMVAWLLS

SEQ ID NO: 9194 - DNA, 1476 bp, Arabidopsis thaliana
atggatccttataaatatagacctgcttcatcatataattcacctttttttactactaattcaggagctcctgtttggaataataattcatcaatgactgttggacctagaggattgattttgttggaagattatcatttggttgaaaaattggctaattttgatagagaaagaattcctgaaagagttgttcatgctagaggagcttcagctaaaggattttttgaagttactcatgatatttcaaatttgacttgcgctgattttttgagagctcctggagttcaaactcctgttattgttagattttcaactgttattcatgctagaggatcacctgaaactttgagagatcctagaggatttgctgttaaattttatactagagaaggaaattttgatttggttggaaataattttcctgttttttttattagagatggaatgaaatttcctgatattgttcatgctttgaaacctaatcctaaatcacatattcaagaaaattggagaattttggattttttttcacatcatcctgaatcattgaatatgtttacttttttgtttgatgatattggaattcctcaagattatagacatatggatggatcaggagttaatacttatatgttgattaataaagctggaaaagctcattatgttaaatttcattggaaacctacttgcggagttaaatcattgttggaagaagatgctattagattgggaggaactaatcattcacatgctactcaagatttgtatgattcaattgctgctggaaattatcctgaatggaaattgtttattcaaattattgatcctgctgatgaagataaatttgattttgatcctttggatgttactaaaacttggcctgaagatattttgcctttgcaacctgttggaagaatggttttgaataaaaatattgataatttttttgctgaaaatgaacaattggctttttgccctgctattattgttcctggaattcattattcagatgataaattgttgcaaactagagttttttcatatgctgatactcaaagacatagattgggacctaattatttgcaattgcctgttaatgctcctaaatgcgctcatcataataatcatcatgaaggatttatgaattttatgcatagagatgaagaagttaattattttccttcaagatatgatcaagttagacatgctgaaaaatatcctactcctcctgctgtttgctcaggaaaaagagaaagatgcattattgaaaaagaaaataattttaaagaacctggagaaagatatagaacttttactcctgaaagacaagaaagatttattcaaagatggattgatgctttgtcagatcctagaattactcatgaaattagatcaatttggatttcatattggtcacaagctgataaatcattgggacaaaaattggcttcaagattgaatgttagaccttcaatt

SEQ ID NO: 9195 - protein, 492 aa, Arabidopsis thaliana
MDPYKYRPASSYNSPFFTTNSGAPVWNNNSSMTVGPRGLILLEDYHLVEKLANFDRERIPERVVHARGASAKGFFEVTHDISNLTCADFLRAPGVQTPVIVRFSTVIHARGSPETLRDPRGFAVKFYTREGNFDLVGNNFPVFFIRDGMKFPDIVHALKPNPKSHIQENWRILDFFSHHPESLNMFTFLFDDIGIPQDYRHMDGSGVNTYMLINKAGKAHYVKFHWKPTCGVKSLLEEDAIRLGGTNHSHATQDLYDSIAAGNYPEWKLFIQIIDPADEDKFDFDPLDVTKTWPEDILPLQPVGRMVLNKNIDNFFAENEQLAFCPAIIVPGIHYSDDKLLQTRVFSYADTQRHRLGPNYLQLPVNAPKCAHHNNHHEGFMNFMHRDEEVNYFPSRYDQVRHAEKYPTPPAVCSGKRERCIIEKENNFKEPGERYRTFTPERQERFIQRWIDALSDPRITHEIRSIWISYWSQADKSLGQKLASRLNVRPSI

SEQ ID NO: 9196 - DNA, 2262 bp, Escherichia coli
atgtcgcaacataacgaaaagaacccacatcagcaccagtcaccactacacgattccagcgaagcgaaaccggggatggactcactggcacctgaggacggctctcatcgtccagcggctgaaccaacaccgccaggtgcacaacctaccgccccagggagcctgaaagcccctgatacgcgtaacgaaaaacttaattctctggaagacgtacgcaaaggcagtgaaaattatgcgctgaccactaatcagggcgtgcgcatcgccgacgatcaaaactcactgcgtgccggtagccgtggtccaacgctgctggaagattttattctgcgcgagaaaatcacccactttgaccatgagcgcattccggaacgtattgttcatgcacgcggatcagccgctcacggttatttccagccatataaaagcttaagcgatattaccaaagcggatttcctctcagatccgaacaaaatcaccccagtatttgtacgtttctctaccgttcagggtggtgctggctctgctgataccgtgcgtgatatccgtggctttgccaccaagttctataccgaagagggtatttttgacctcgttggcaataacacgccaatcttctttatccaggatgcgcataaattccccgattttgttcatgcggtaaaaccagaaccgcactgggcaattccacaagggcaaagtgcccacgatactttctgggattatgtttctctgcaacctgaaactctgcacaacgtgatgtgggcgatgtcggatcgcggcatcccccgcagttaccgcaccatggaaggcttcggtattcacaccttccgcctgattaatgccgaagggaaggcaacgtttgtacgtttccactggaaaccactggcaggtaaagcctcactcgtttgggatgaagcacaaaaactcaccggacgtgacccggacttccaccgccgcgagttgtgggaagccattgaagcaggcgattttccggaatacgaactgggcttccagttgattcctgaagaagatgaattcaagttcgacttcgatcttctcgatccaaccaaacttatcccggaagaactggtgcccgttcagcgtgtcggcaaaatggtgctcaatcgcaacccggataacttctttgctgaaaacgaacaggcggctttccatcctgggcatatcgtgccgggactggacttcaccaacgatccgctgttgcagggacgtttgttctcctataccgatacacaaatcagtcgtcttggtgggccgaatttccatgagattccgattaaccgtccgacctgcccttaccataatttccagcgtgacggcatgcatcgcatggggatcgacactaacccggcgaattacgaaccgaactcgattaacgataactggccgcgcgaaacaccgccggggccgaaacgcggcggttttgaatcataccaggagcgcgtggaaggcaataaagttcgcgagcgcagcccatcgtttggcgaatattattcccatccgcgtctgttctggctaagtcagacgccatttgagcagcgccatattgtcgatggtttcagttttgagttaagcaaagtcgttcgtccgtatattcgtgagcgcgttgttgaccagctggcgcatattgatctcactctggcccaggcggtggcgaaaaatctcggtatcgaactgactgacgaccagctgaatatcaccccacctccggacgtcaacggtctgaaaaaggatccatccttaagtttgtacgccattcctgacggtgatgtgaaaggtcgcgtggtagcgattttacttaatgatgaagtgagatcggcagaccttctggccattctcaaggcgctgaaggccaaaggcgttcatgccaaactgctctactcccgaatgggtgaagtgactgcggatgacggtacggtgttgcctatagccgctacctttgccggtgcaccttcgctgacggtcgatgcggtcattgtcccttgcggcaatatcgcggatatcgctgacaacggcgatgccaactactacctgatggaagcctacaaacaccttaaaccgattgcgctggcgggtgacgcgcgcaagtttaaagcaacaatcaagatcgctgaccagggtgaagaagggattgtggaagctgacagcgctgacggtagttttatggatgaactgctaacgctgatggcagcacaccgcgtgtggtcacgcattcctaagattgacaaaattcctgcctga

SEQ ID NO: 9197 - protein, 753 aa, Escherichia coli
MSQHNEKNPHQHQSPLHDSSEAKPGMDSLAPEDGSHRPAAEPTPPGAQPTAPGSLKAPDTRNEKLNSLEDVRKGSENYALTTNQGVRIADDQNSLRAGSRGPTLLEDFILREKITHFDHERIPERIVHARGSAAHGYFQPYKSLSDITKADFLSDPNKITPVFVRFSTVQGGAGSADTVRDIRGFATKFYTEEGIFDLVGNNTPIFFIQDAHKFPDFVHAVKPEPHWAIPQGQSAHDTFWDYVSLQPETLHNVMWAMSDRGIPRSYRTMEGFGIHTFRLINAEGKATFVRFHWKPLAGKASLVWDEAQKLTGRDPDFHRRELWEAIEAGDFPEYELGFQLIPEEDEFKFDFDLLDPTKLIPEELVPVQRVGKMVLNRNPDNFFAENEQAAFHPGHIVPGLDFTNDPLLQGRLFSYTDTQISRLGGPNFHEIPINRPTCPYHNFQRDGMHRMGIDTNPANYEPNSINDNWPRETPPGPKRGGFESYQERVEGNKVRERSPSFGEYYSHPRLFWLSQTPFEQRHIVDGFSFELSKVVRPYIRERVVDQLAHIDLTLAQAVAKNLGIELTDDQLNITPPPDVNGLKKDPSLSLYAIPDGDVKGRVVAILLNDEVRSADLLAILKALKAKGVHAKLLYSRMGEVTADDGTVLPIAATFAGAPSLTVDAVIVPCGNIADIADNGDANYYLMEAYKHLKPIALAGDARKFKATIKIADQGEEGIVEADSADGSFMDELLTLMAAHRVWSRIPKIDKIPA

SEQ ID NO: 9198 - DNA, 1635 bp, Cannabis sativa
atgaagtgctcaacattctccttttggtttgtttgcaagataatatttttctttttctcattcaatatccaaacttccattgctaatcctcgagaaaacttccttaaatgcttctcgcaatatattcccaataatgcaacaaatctaaaactcgtatacactcaaaacaacccattgtatatgtctgtcctaaattcgacaatacacaatcttagattcacctctgacacaaccccaaaaccacttgttatcgtcactccttcacatgtctctcatatccaaggcactattctatgctccaagaaagttggcttgcagattcgaactcgaagtggtggtcatgattctgagggcatgtcctacatatctcaagtcccatttgttatagtagacttgagaaacatgcgttcaatcaaaatagatgttcatagccaaactgcatgggttgaagccggagctacccttggagaagtttattattgggttaatgagaaaaatgagaatcttagtttggcggctgggtattgccctactgtttgcgcaggtggacactttggtggaggaggctatggaccattgatgagaaactatggcctcgcggctgataatatcattgatgcacacttagtcaacgttcatggaaaagtgctagatcgaaaatctatgggggaagatctcttttgggctttacgtggtggtggagcagaaagcttcggaatcattgtagcatggaaaattagactggttgctgtcccaaagtctactatgtttagtgttaaaaagatcatggagatacatgagcttgtcaagttagttaacaaatggcaaaatattgcttacaagtatgacaaagatttattactcatgactcacttcataactaggaacattacagataatcaagggaagaataagacagcaatacacacttacttctcttcagttttccttggtggagtggatagtctagtcgacttgatgaacaagagttttcctgagttgggtattaaaaaaacggattgcagacaattgagctggattgatactatcatcttctatagtggtgttgtaaattacgacactgataattttaacaaggaaattttgcttgatagatccgctgggcagaacggtgctttcaagattaagttagactacgttaagaaaccaattccagaatctgtatttgtccaaattttggaaaaattatatgaagaagatataggagctgggatgtatgcgttgtacccttacggtggtataatggatgagatttcagaatcagcaattccattccctcatcgagctggaatcttgtatgagttatggtacatatgtagttgggagaagcaagaagataacgaaaagcatctaaactggattagaaatatttataacttcatgactccttatgtgtccaaaaatccaagattggcatatctcaattatagagaccttgatataggaataaatgatcccaagaatccaaataattacacacaagcacgtatttggggtgagaagtattttggtaaaaattttgacaggctagtaaaagtgaaaaccctggttgatcccaataacttttttagaaacgaacaaagcatcccacctctaccacggcatcgtcattaa

SEQ ID NO: 9199 - protein, 544 aa, Cannabis sativa
MKCSTFSFWFVCKIIFFFFSFNIQTSIANPRENFLKCFSQYIPNNATNLKLVYTQNNPLYMSVLNSTIHNLRFTSDTTPKPLVIVTPSHVSHIQGTILCSKKVGLQIRTRSGGHDSEGMSYISQVPFVIVDLRNMRSIKIDVHSQTAWVEAGATLGEVYYWVNEKNENLSLAAGYCPTVCAGGHFGGGGYGPLMRNYGLAADNIIDAHLVNVHGKVLDRKSMGEDLFWALRGGGAESFGIIVAWKIRLVAVPKSTMFSVKKIMEIHELVKLVNKWQNIAYKYDKDLLLMTHFITRNITDNQGKNKTAIHTYFSSVFLGGVDSLVDLMNKSFPELGIKKTDCRQLSWIDTIIFYSGVVNYDTDNFNKEILLDRSAGQNGAFKIKLDYVKKPIPESVFVQILEKLYEEDIGAGMYALYPYGGIMDEISESAIPFPHRAGILYELWYICSWEKQEDNEKHLNWIRNIYNFMTPYVSKNPRLAYLNYRDLDIGINDPKNPNNYTQARIWGEKYFGKNFDRLVKVKTLVDPNNFFRNEQSIPPLPRHRH

SEQ ID NO: 9200 - DNA, 1467 bp, Stevia rebaudiana
atgaagtgctcaacattctccttttggtttgtttgcaagataatatttttctttttctcattcaatatccaaacttccattgctaatcctcgagaaaataaaactgaaactactgttagaagaagaagaagaattattttgtttcctgttccttttcaaggacatattaatcctattttgcaattggctaatgttttgtattcaaaaggattttcaattactatttttcatactaattttaataaacctaaaacttcaaattatcctcattttacttttagatttattttggataatgatcctcaagatgaaagaatttcaaatttgcctactcatggacctttggctggaatgagaattcctattattaatgaacatggagctgatgaattgagaagagaattggaattgttgatgttggcttcagaagaagatgaagaagtttcatgcttgattactgatgctttgtggtattttgctcaatcagttgctgattcattgaatttgagaagattggttttgatgacttcatcattgtttaattttcatgctcatgtttcattgcctcaatttgatgaattgggatatttggatcctgatgataaaactagattggaagaacaagcttcaggatttcctatgttgaaagttaaagatattaaatcagcttattcaaattggcaaattttgaaagaaattttgggaaaaatgattaaacaaactagagcttcatcaggagttatttggaattcatttaaagaattggaagaatcagaattggaaactgttattagagaaattcctgctccttcatttttgattcctttgcctaaacatttgactgcttcatcatcatcattgttggatcatgatagaactgtttttcaatggttggatcaacaacctccttcatcagttttgtatgtttcatttggatcaacttcagaagttgatgaaaaagattttttggaaattgctagaggattggttgattcaaaacaatcatttttgtgggttgttagacctggatttgttaaaggatcaacttgggttgaacctttgcctgatggatttttgggagaaagaggaagaattgttaaatgggttcctcaacaagaagttttggctcatggagctattggagctttttggactcattcaggatggaattcaactttggaatcagtttgcgaaggagttcctatgattttttcagattttggattggatcaacctttgaatgctagatatatgtcagatgttttgaaagttggagtttatttggaaaatggatgggaaagaggagaaattgctaatgctattagaagagttatggttgatgaagaaggagaatatattagacaaaatgctagagttttgaaacaaaaagctgatgtttcattgatgaaaggaggatcatcatatgaatcattggaatcattggtttcatatatttcatcattgtaa

SEQ ID NO: 9201 - protein, 488 aa, Stevia rebaudiana
MKCSTFSFWFVCKIIFFFFSFNIQTSIANPRENKTETTVRRRRRIILFPVPFQGHINPILQLANVLYSKGFSITIFHTNFNKPKTSNYPHFTFRFILDNDPQDERISNLPTHGPLAGMRIPIINEHGADELRRELELLMLASEEDEEVSCLITDALWYFAQSVADSLNLRRLVLMTSSLFNFHAHVSLPQFDELGYLDPDDKTRLEEQASGFPMLKVKDIKSAYSNWQILKEILGKMIKQTRASSGVIWNSFKELEESELETVIREIPAPSFLIPLPKHLTASSSSLLDHDRTVFQWLDQQPPSSVLYVSFGSTSEVDEKDFLEIARGLVDSKQSFLWVVRPGFVKGSTWVEPLPDGFLGERGRIVKWVPQQEVLAHGAIGAFWTHSGWNSTLESVCEGVPMIFSDFGLDQPLNARYMSDVLKVGVYLENGWERGEIANAIRRVMVDEEGEYIRQNARVLKQKADVSLMKGGSSYESLESLVSYISSL

SEQ ID NO: 9202 - DNA, 1022 bp, Arabidopsis thaliana
atggaggtccatggctccggattccgtcgaattctgttgttggcgttgtgtatctccgggatctggtccgcctacatctaccaaggcgttcttcaagagactctgtccacgaagagatttggtccagatgagaagaggttcgagcatcttgcattcttgaacttagctcaaagtgtagtctgcttgatctggtcttatataatgatcaagctctggtcaaatgctggtaacggtggagcaccatggtggacgtattggagtgcaggcattactaatacaattggtcctgccatgggaattgaagccttgaagtatatcagttatccagctcaggttttggcaaaatcgtcaaaaatgattccagttatgctaatgggaactttagtttacggaataagatacactttccctgaatacatgtgcacctttcttgtcgctggaggagtatccatctttgctcttcttaagacaagctctaagacaattagcaagctagcacatccaaatgctcccctcggttacgcactttgttccttaaacctcgcctttgacggattcacaaatgccacacaagactccattgcctcaaggtacccaaaaaccgaagcgtgggacataatgctgggaatgaacttatggggcacaatatacaacattatctacatgtttggcttgccacaagggatggattcgaagcaattcagttctgtaagctacacccggaagcggcatgggacattctaaagtattgtatatgcggtgccgtgggacaaaacttcatcttcatgacaataagtaacttcgggtcactagctaacacgaccataaccacgaccaggaagtttgttagcattgttgtatcatcagtaatgagcggaaatccattgtcgttgaagcaatggggatgtgtttcgatggtctttggtggtttggcatatcaaatttatcttaaatggaagaaattgcagagagtggagtgctccataatgaacttaatgtgtgggtctacctgcgccgcttga

SEQ ID NO: 9203 - DNA, 1554 bp, Cannabis sativa
atgaatcctcgagaaaacttccttaaatgcttctcgcaatatattcccaataatgcaacaaatctaaaactcgtatacactcaaaacaacccattgtatatgtctgtcctaaattcgacaatacacaatcttagattcacctctgacacaaccccaaaaccacttgttatcgtcactccttcacatgtctctcatatccaaggcactattctatgctccaagaaagttggcttgcagattcgaactcgaagtggtggtcatgattctgagggcatgtcctacatatctcaagtcccatttgttatagtagacttgagaaacatgcgttcaatcaaaatagatgttcatagccaaactgcatgggttgaagccggagctacccttggagaagtttattattgggttaatgagaaaaatgagaatcttagtttggcggctgggtattgccctactgtttgcgcaggtggacactttggtggaggaggctatggaccattgatgagaaactatggcctcgcggctgataatatcattgatgcacacttagtcaacgttcatggaaaagtgctagatcgaaaatctatgggggaagatctcttttgggctttacgtggtggtggagcagaaagcttcggaatcattgtagcatggaaaattagactggttgctgtcccaaagtctactatgtttagtgttaaaaagatcatggagatacatgagcttgtcaagttagttaacaaatggcaaaatattgcttacaagtatgacaaagatttattactcatgactcacttcataactaggaacattacagataatcaagggaagaataagacagcaatacacacttacttctcttcagttttccttggtggagtggatagtctagtcgacttgatgaacaagagttttcctgagttgggtattaaaaaaacggattgcagacaattgagctggattgatactatcatcttctatagtggtgttgtaaattacgacactgataattttaacaaggaaattttgcttgatagatccgctgggcagaacggtgctttcaagattaagttagactacgttaagaaaccaattccagaatctgtatttgtccaaattttggaaaaattatatgaagaagatataggagctgggatgtatgcgttgtacccttacggtggtataatggatgagatttcagaatcagcaattccattccctcatcgagctggaatcttgtatgagttatggtacatatgtagttgggagaagcaagaagataacgaaaagcatctaaactggattagaaatatttataacttcatgactccttatgtgtccaaaaatccaagattggcatatctcaattatagagaccttgatataggaataaatgatcccaagaatccaaataattacacacaagcacgtatttggggtgagaagtattttggtaaaaattttgacaggctagtaaaagtgaaaaccctggttgatcccaataacttttttagaaacgaacaaagcatcccacctctaccacggcatcgtcattaa

SEQ ID NO: 9204 - protein, 517 aa, Cannabis sativa
MNPRENFLKCFSQYIPNNATNLKLVYTQNNPLYMSVLNSTIHNLRFTSDTTPKPLVIVTPSHVSHIQGTILCSKKVGLQIRTRSGGHDSEGMSYISQVPFVIVDLRNMRSIKIDVHSQTAWVEAGATLGEVYYWVNEKNENLSLAAGYCPTVCAGGHFGGGGYGPLMRNYGLAADNIIDAHLVNVHGKVLDRKSMGEDLFWALRGGGAESFGIIVAWKIRLVAVPKSTMFSVKKIMEIHELVKLVNKWQNIAYKYDKDLLLMTHFITRNITDNQGKNKTAIHTYFSSVFLGGVDSLVDLMNKSFPELGIKKTDCRQLSWIDTIIFYSGVVNYDTDNFNKEILLDRSAGQNGAFKIKLDYVKKPIPESVFVQILEKLYEEDIGAGMYALYPYGGIMDEISESAIPFPHRAGILYELWYICSWEKQEDNEKHLNWIRNIYNFMTPYVSKNPRLAYLNYRDLDIGINDPKNPNNYTQARIWGEKYFGKNFDRLVKVKTLVDPNNFFRNEQSIPPLPRHRH

SEQ ID NO: 9205 - DNA, 1377 bp, Stevia rebaudiana
atggaaaataaaaccgaaaccaccgtccgccgtcgtcgccgtatcattctgttcccggtcccgttccagggccacatcaacccgattctgcaactggcgaacgtgctgtattcgaaaggtttcagcatcaccatcttccatacgaacttcaacaagccgaagaccagcaattacccgcactttacgttccgttttattctggataacgacccgcaggatgaacgcatctctaatctgccgacccacggcccgctggcgggtatgcgtattccgattatcaacgaacacggcgcagatgaactgcgtcgcgaactggaactgctgatgctggccagcgaagaagatgaagaagtttcttgcctgatcaccgacgcactgtggtattttgcccagtctgttgcagatagtctgaacctgcgtcgcctggtcctgatgaccagcagcctgttcaattttcatgcccacgttagtctgccgcagttcgatgaactgggttatctggacccggatgacaaaacccgcctggaagaacaggcgagcggctttccgatgctgaaagtcaaggatattaagtcagcgtactcgaactggcagattctgaaagaaatcctgggtaaaatgattaagcaaaccaaagcaagttccggcgtcatctggaatagtttcaaagaactggaagaatccgaactggaaacggtgattcgtgaaatcccggctccgagttttctgattccgctgccgaagcatctgaccgcgagcagcagcagcctgctggatcacgaccgcacggtgtttcagtggctggatcagcaaccgccgagttccgtgctgtatgttagcttcggtagtacctcggaagtggatgaaaaggactttctggaaatcgctcgtggcctggttgatagcaaacaatctttcctgtgggtggttcgcccgggttttgtgaagggctctacgtgggttgaaccgctgccggacggcttcctgggtgaacgtggccgcattgtcaaatgggtgccgcagcaagaagtgctggcgcatggcgcgattggcgcgttttggacccactccggttggaactcaacgctggaatcggtttgtgaaggtgtcccgatgattttctcagattttggcctggaccagccgctgaatgcacgttatatgtcggatgttctgaaagtcggtgtgtacctggaaaacggttgggaacgcggcgaaattgcgaatgccatccgtcgcgttatggtcgatgaagaaggcgaatacattcgtcagaatgctcgcgtcctgaaacaaaaggcggacgtgagcctgatgaaaggcggttcatcgtatgaaagtctggaatccctggtttcatacatcagctctctgtaa

SEQ ID NO: 9206 - protein, 458 aa, Stevia rebaudiana
MENKTETTVRRRRRIILFPVPFQGHINPILQLANVLYSKGFSITIFHTNFNKPKTSNYPHFTFRFILDNDPQDERISNLPTHGPLAGMRIPIINEHGADELRRELELLMLASEEDEEVSCLITDALWYFAQSVADSLNLRRLVLMTSSLFNFHAHVSLPQFDELGYLDPDDKTRLEEQASGFPMLKVKDIKSAYSNWQILKEILGKMIKQTKASSGVIWNSFKELEESELETVIREIPAPSFLIPLPKHLTASSSSLLDHDRTVFQWLDQQPPSSVLYVSFGSTSEVDEKDFLEIARGLVDSKQSFLWVVRPGFVKGSTWVEPLPDGFLGERGRIVKWVPQQEVLAHGAIGAFWTHSGWNSTLESVCEGVPMIFSDFGLDQPLNARYMSDVLKVGVYLENGWERGEIANAIRRVMVDEEGEYIRQNARVLKQKADVSLMKGGSSYESLESLVSYISSL

SEQ ID NO: 9207 - protein, 485 aa, Nicotiana tabacum
MGSIGAELTKPHAVCIPYPAQGHINPMLKLAKILHHKGFHITFVNTEFNHRRLLKSRGPDSLKGLSSFRFETIPDGLPPCEADATQDIPSLCESTTNTCLAPFRDLLAKLNDTNTSNVPPVSCIVSDGVMSFTLAAAQELGVPEVLFWTTSACGFLGYMHYCKVIEKGYAPLKDASDLTNGYLETTLDFIPGMKDVRLRDLPSFLRTTNPDEFMIKFVLQETERARKASAIILNTFETLEAEVLESLRNLLPPVYPIGPLHFLVKHVDDENLKGLRSSLWKEEPECIQWLDTKEPNSVVYVNFGSITVMTPNQLIEFAWGLANSQQTFLWIIRPDIVSGDASILPPEFVEETKNRGMLASWCSQEEVLSHPAIVGFLTHSGWNSTLESISSGVPMICWPFFAEQQTNCWFSVTKWDVGMEIDSDVKRDEVESLVRELMVGGKGKKMKKKAMEWKELAEASAKEHSGSSYVNIEKLVNDILLSSKH

SEQ ID NO: 9208 - DNA, 1458 bp, Nicotiana tabacum
atgggttccattggtgctgaattaacaaagccacatgcagtttgcataccatatcccgcccaaggccatattaaccccatgttaaagctagccaaaatccttcatcacaaaggctttcacatcacttttgtcaatactgaatttaaccaccgacgtctccttaaatctcgtggccctgattctctcaagggtctttcttctttccgttttgagaccattcctgatggacttccgccatgtgaggcagatgccacacaagatataccttctttgtgtgaatctacaaccaatacttgcttggctccttttagggatcttcttgcgaaactcaatgatactaacacatctaacgtgccacccgtttcgtgcatcgtctcggatggtgtcatgagcttcaccttagccgctgcacaagaattgggagtccctgaagttctgttttggaccactagtgcttgtggtttcttaggttacatgcattactgcaaggttattgaaaaaggatatgctccacttaaagatgcgagtgacttgacaaatggatacctagagacaacattggattttataccaggcatgaaagacgtacgtttaagggatcttccaagtttcttgagaactacaaatccagatgaattcatgatcaaatttgtcctccaagaaacagagagagcaagaaaggcttctgcaattatcctcaacacatttgaaacactagaggctgaagttcttgaatcgctccgaaatcttcttcctccagtctaccccatagggcccttgcattttctagtgaaacatgttgatgatgagaatttgaagggacttagatccagcctttggaaagaggaaccagagtgtatacaatggcttgataccaaagaaccaaattctgttgtttatgttaactttggaagcattactgttatgactcctaatcagcttattgagtttgcttggggacttgcaaacagccagcaaacattcttatggatcataagacctgatattgtttcaggtgatgcatcgattcttccacccgaattcgtggaagaaacgaagaacagaggtatgcttgctagttggtgttcacaagaagaagtacttagtcaccctgcaatagtaggattcttgactcacagtggatggaattcgacactcgaaagtataagcagtggggtgcctatgatttgctggccatttttcgctgaacagcaaacaaattgttggttttccgtcactaaatgggatgttggaatggagattgacagtgatgtgaagagagatgaagtggaaagccttgtaagggaattgatggttgggggaaaaggcaaaaagatgaagaaaaaggcaatggaatggaaggaattggctgaagcatctgctaaagaacattcagggtcatcttatgtgaacattgaaaagttggtcaatgatattcttctttcatccaaacattaa

SEQ ID NO: 9209 - protein, 485 aa, Nicotiana tabacum
MGSIGAEFTKPHAVCIPYPAQGHINPMLKLAKILHHKGFHITFVNTEFNHRRLLKSRGPDSLKGLSSFRFETIPDGLPPCDADATQDIPSLCESTTNTCLGPFRDLLAKLNDTNTSNVPPVSCIISDGVMSFTLAAAQELGVPEVLFWTTSACGFLGYMHYYKVIEKGYAPLKDASDLTNGYLETTLDFIPCMKDVRLRDLPSFLRTTNPDEFMIKFVLQETERARKASAIILNTYETLEAEVLESLRNLLPPVYPIGPLHFLVKHVDDENLKGLRSSLWKEEPECIQWLDTKEPNSVVYVNFGSITVMTPNQLIEFAWGLANSQQSFLWIIRPDIVSGDASILPPEFVEETKKRGMLASWCSQEEVLSHPAIGGFLTHSGWNSTLESISSGVPMICWPFFAEQQTNCWFSVTKWDVGMEIDCDVKRDEVESLVRELMVGGKGKKMKKKAMEWKELAEASAKEHSGSSYVNIEKVVNDILLSSKH

SEQ ID NO: 9210 - DNA, 1458 bp, Nicotiana tabacum
atgggttccattggtgctgaatttacaaagccacatgcagtttgcataccatatcccgcccaaggccatattaaccccatgttaaagctagccaaaatccttcatcacaaaggctttcacatcacttttgtcaatactgaatttaaccacagacgtctgcttaaatctcgtggccctgattctctcaagggtctttcttctttccgttttgagacaattcctgatggacttccgccatgtgatgcagatgccacacaagatataccttctttgtgtgaatctacaaccaatacttgcttgggtccttttagggatcttcttgcgaaactcaatgatactaacacatctaacgtgccacccgtttcgtgcatcatctcagatggtgtcatgagcttcaccttagccgctgcacaagaattgggagtccctgaagttctgttttggaccactagtgcttgtggtttcttaggttacatgcattattacaaggttattgaaaaaggatacgctccacttaaagatgcgagtgacttgacaaatggatacctagagacaacattggattttataccatgcatgaaagacgtacgtttaagggatcttccaagtttcttgagaactacaaatccagatgaattcatgatcaaatttgtcctccaagaaacagagagagcaagaaaggcttctgcaattatcctcaacacatatgaaacactagaggctgaagttcttgaatcgctccgaaatcttcttcctccagtctaccccattgggcccttgcattttctagtgaaacatgttgatgatgagaatttgaagggacttagatccagcctttggaaagaggaaccagagtgtatacaatggcttgataccaaagaaccaaattctgttgtttatgttaactttggaagcattactgttatgactcctaatcaacttattgaatttgcttggggacttgcaaacagccaacaatcattcttatggatcataagacctgatattgtttcaggtgatgcatcgattcttccccccgaattcgtggaagaaacgaagaagagaggtatgcttgctagttggtgttcacaagaagaagtacttagtcaccctgcaataggaggattcttgactcacagtggatggaattcgacactcgaaagtataagcagtggggtgcctatgatttgctggccatttttcgctgaacagcaaacaaattgttggttttccgtcactaaatgggatgttggaatggagattgactgtgatgtgaagagggatgaagtggaaagccttgtaagggaattgatggttgggggaaaaggcaaaaagatgaagaaaaaggcaatggaatggaaggaattggctgaagcatctgctaaagaacattcagggtcatcttatgtgaacattgagaaggtggtcaatgatattcttctttcgtccaaacattaa

SEQ ID NO: 9211 - protein, 496 aa, Nicotiana tabacum
MATQVHKLHFILFPLMAPGHMIPMIDIAKLLANRGVITTIITTPVNANRFSSTITRAIKSGLRIQILTLKFPSVEVGLPEGCENIDMLPSLDLASKFFAAISMLKQQVENLLEGINPSPSCVISDMGFPWTTQIAQNFNIPRIVFHGTCCFSLLCSYKILSSNILENITSDSEYFVVPDLPDRVELTKAQVSGSTKNTTSVSSSVLKEVTEQIRLAEESSYGVIVNSFEELEQVYEKEYRKARGKKVWCVGPVSLCNKEIEDLVTRGNKTAIDNQDCLKWLDNFETESVVYASLGSLSRLTLLQMVELGLGLEESNRPFVWVLGGGDKLNDLEKWILENGFEQRIKERGVLIRGWAPQVLILSHPAIGGVLTHCGWNSTLEGISAGLPMVTWPLFAEQFCNEKLVVQVLKIGVSLGVKVPVKWGDEENVGVLVKKDDVKKALDKLMDEGEEGQVRRTKAKELGELAKKAFGEGGSSYVNLTSLIEDIIEQQNHKEK

SEQ ID NO: 9212 - DNA, 1491 bp, Nicotiana tabacum
atggcaactcaagtgcacaaacttcatttcatactattccctttaatggctccaggccacatgattcctatgatagacatagctaaacttctagcaaatcgcggtgtcattaccactatcatcaccactccagtaaacgccaatcgtttcagttcaacaattactcgtgccataaaatccggtctaagaatccaaattcttacactcaaatttccaagtgtagaagtaggattaccagaaggttgcgaaaatattgacatgcttccttctcttgacttggcttcaaagttttttgctgcaattagtatgctgaaacaacaagttgaaaatctcttagaaggaataaatccaagtccaagttgtgttatttcagatatgggatttccttggactactcaaattgcacaaaattttaatatcccaagaattgtttttcatggtacttgttgtttctcacttttatgttcctataaaatactttcctccaacattcttgaaaatataacctcagattcagagtattttgttgttcctgatttacccgatagagttgaactaacgaaagctcaggtttcaggatcgacgaaaaatactacttctgttagttcttctgtattgaaagaagttactgagcaaatcagattagccgaggaatcatcatatggtgtaattgttaatagttttgaggagttggagcaagtgtatgagaaagaatataggaaagctagagggaaaaaagtttggtgtgttggtcctgtttctttgtgtaataaggaaattgaagatttggttacaaggggtaataaaactgcaattgataatcaagattgcttgaaatggttagataattttgaaacagaatctgtggtttatgcaagtcttggaagtttatctcgtttgacattattgcaaatggtggaacttggtcttggtttagaagagtcaaataggccttttgtatgggtattaggaggaggtgataaattaaatgatttagagaaatggattcttgagaatggatttgagcaaagaattaaagaaagaggagttttgattagaggatgggctcctcaagtgcttatactttcacaccctgcaattggtggagtattgactcattgcggatggaattctacattggaaggtatttcagcaggattaccaatggtaacatggccactatttgctgagcaattttgcaatgagaagttagtagtccaagtgctaaaaattggagtgagcctaggtgtgaaggtgcctgtcaaatggggagatgaggaaaatgttggagttttggtaaaaaaggatgatgttaagaaagcattagacaaactaatggatgaaggagaagaaggacaagtaagaagaacaaaagcaaaagagttaggagaattggctaaaaaggcatttggagaaggtggttcttcttatgttaacttaacatctctgattgaagacatcattgagcaacaaaatcacaaggaaaaatag

SEQ ID NO: 9213 - protein, 479 aa, Nicotiana tabacum
MKTAELVFIPAPGMGHLVPTVEVAKQLVDRHEQLSITVLIMTIPLETNIPSYTKSLSSDYSSRITLLPLSQPETSVTMSSFNAINFFEYISSYKGRVKDAVSETSFSSSNSVKLAGFVIDMFCTAMIDVANEFGIPSYVFYTSSAAMLGLQLHFQSLSIECSPKVHNYVEPESEVLISTYMNPVPVKCLPGIILVNDESSTMFVNHARRFRETKGIMVNTFTELESHALKALSDDEKIPPIYPVGPILNLENGNEDHNQEYDAIMKWLDEKPNSSVVFLCFGSKGSFEEDQVKEIANALESSGYHFLWSLRRPPPKDKLQFPSEFENPEEVLPEGFFQRTKGRGKVIGWAPQLAILSHPSVGGFVSHCGWNSTLESVRSGVPIATWPLYAEQQSNAFQLVKDLGMAVEIKMDYREDFNTRNPPLVKAEEIEDGIRKLMDSENKIRAKVTEMKDKSRAALLEGGSSYVALGHFVETVMKN

SEQ ID NO: 9214 - DNA, 1440 bp, Nicotiana tabacum
atgaagacagcagagttagtattcattcctgctcctgggatgggtcaccttgtaccaactgtggaggtggcaaagcaactagtcgacagacacgagcagctttcgatcacagttctaatcatgacaattcctttggaaacaaatattccatcatatactaaatcactgtcctcagactacagttctcgtataacgctgcttccactctctcaacctgagacctctgttactatgagcagttttaatgccatcaatttttttgagtacatctccagctacaagggtcgtgtcaaagatgctgttagtgaaacctcctttagttcgtcaaattctgtgaaacttgcaggatttgtaatagacatgttctgcactgcgatgattgatgtagcgaacgagtttggaatcccaagttatgtgttctacacttctagtgcagctatgcttggactacaactgcattttcaaagtcttagcattgaatgcagtccgaaagttcataactacgttgaacctgaatcagaagttctgatctcaacttacatgaatccggttccagtcaaatgtttgcccggaattatactagtaaatgatgaaagtagcaccatgtttgtcaatcatgcacgaagattcagggagacgaaaggaattatggtgaacacgttcactgagcttgaatcacacgctttgaaagccctttccgatgatgaaaaaatcccaccaatctacccagttggacctatacttaaccttgaaaatgggaatgaagatcacaatcaagaatatgatgcgattatgaagtggcttgacgagaagcctaattcatcagtggtgttcttatgctttggaagcaaggggtctttcgaagaagatcaggtgaaggaaatagcaaatgctctagagagcagtggctaccacttcttgtggtcgctaaggcgaccgccaccaaaagacaagctacaattcccaagcgaattcgagaatccagaggaagtcttaccagagggattctttcaaaggactaaaggaagaggaaaggtgataggatgggcaccccagttggctattttgtctcatccttcagtaggaggattcgtgtcgcattgtgggtggaattcaactctggagagcgttcgaagtggagtgccgatagcaacatggccattgtatgcagagcaacagagcaatgcatttcaactggtgaaggatttgggtatggcagtagagattaagatggattacagggaagattttaatacgagaaatccaccactggttaaagctgaggagatagaagatggaattaggaagctgatggattcagagaataaaatcagggctaaggtgacggagatgaaggacaaaagtagagcagcactgctggagggcggatcatcatatgtagctcttgggcattttgttgagactgtcatgaaaaactag

SEQ ID NO: 9215 - protein, 478 aa, Nicotiana tabacum; identical to SEQ ID NO: 6192

SEQ ID NO: 9216 - DNA, 1437 bp, Nicotiana tabacum
atgaagacaacagagttagtattcattcctgctcctggcatgggtcaccttgtacccactgtggaggtggcaaagcaactagtcgacagagacgaacagctttcaatcacagttctcatcatgacgcttcctttggaaacaaatattccatcatatactaaatcactgtcctcagactacagttctcgtataacgctgcttcaactttctcaacctgagacctctgttagtatgagcagttttaatgccatcaatttttttgagtacatctccagctacaaggatcgtgtcaaagatgctgttaatgaaacctttagttcgtcaagttctgtgaaactcaaaggatttgtaatagacatgttctgcactgcgatgattgatgtggcgaacgagtttggaatcccaagttatgtcttctacacttctaatgcagctatgcttggactccaactccattttcaaagtcttagtattgaatacagtccgaaagttcataattacctagaccctgaatcagaagtagcgatctcaacttacattaatccgattccagtcaaatgtttgcccgggattatactagacaatgataaaagtggcaccatgttcgtcaatcatgcacgaagattcagggagacgaaaggaattatggtgaacacattcgctgagcttgaatcacacgctttgaaagccctttccgatgatgagaaaatcccaccaatctacccagttgggcctatacttaaccttggagatgggaatgaagatcacaatcaagaatatgatatgattatgaagtggctcgacgagcagcctcattcatcagtggtgttcctatgctttggaagcaagggatctttcgaagaagatcaagtgaaggaaatagcaaatgctctagagagaagtggtaaccggttcttgtggtcgctaagacgaccgccaccaaaagacacgctacaattcccaagcgaattcgagaatccagaggaagtcttgccggtgggattctttcaaaggactaaaggaagaggaaaggtgataggatgggcaccccagttggctattttgtctcatcctgcagtaggaggattcgtgtcgcattgtgggtggaattcaactttggagagtgttcgtagtggagtaccgatagcaacatggccattgtatgcagagcaacagagcaatgcatttcaactggtgaaggatttggggatggcagtggagattaagatggattacagggaagattttaataagacaaatccaccactggttaaagctgaggagatagaagatggaattaggaagctgatggattcagagaataaaatcagggctaaggtgatggagatgaaggacaaaagtagagcagcgttattagaaggcggatcatcatatgtagctctcgggcattttgttgagactgtcatgaaaaactaa

SEQ ID NO: 9217 - protein, 482 aa, Nicotiana tabacum; identical to SEQ ID NO: 5908

SEQ ID NO: 9218 - DNA, 1449 bp, Nicotiana tabacum
atgaaagaaaccaagaaaatagagttagtcttcattccttcaccaggaattggccatttagtatccacagttgaaatggcaaagcttcttatagctagagaagagcagctatctatcacagtcctcatcatccaatggcctaacgacaagaagctcgattcttatatccaatcagtcgccaatttcagctcgcgtttgaaattcattcgactccctcaggatgattccattatgcagctactcaaaagcaacattttcaccacgtttattgccagtcataagcctgcagttagagatgctgttgctgatattctcaagtcagaatcaaataatacgctagcaggtattgttatcgacttgttctgcacctcaatgatagacgtggccaatgagttcgagctaccaacctatgttttctacacgtctggtgcagcaacccttggtcttcattatcatatacagaatctcagggatgaatttaacaaagatattaccaagtacaaagacgaacctgaagaaaaactctctatagcaacatatctcaatccatttccagcaaaatgtttgccgtctgtagccttagacaaagaaggtggttcaacaatgtttcttgatctcgcaaaaaggtttcgagaaaccaaaggtattatgataaacacatttctagagctcgaatcctatgcattaaactcgctctcacgagacaagaatcttccacctatataccctgtcggaccagtattgaaccttaacaatgttgaaggtgacaacttaggttcatctgaccagaatactatgaaatggttagatgatcagcccgcttcatctgtagtgttcctttgttttggtagtggtggaagctttgaaaaacatcaagttaaggaaatagcctatgctctggagagcagtgggtgtcggtttttgtggtcgttaaggcgaccaccaaccgaagatgcaagatttccaagcaactatgaaaatcttgaagaaattttgccagaaggattcttggaaagaacaaaagggattggaaaagtgataggatgggcacctcagttggcgattttgtcacataaatcgacggggggatttgtgtcgcactgtggatggaattcgactttggaaagtacatattttggagtgccaatagcaacctggccaatgtacgcggagcaacaagcgaatgcatttcaattggttaaggatttgagaatgggagttgagattaagatggattataggaaggatatgaaagtgatgggcaaagaagttatagtgaaagctgaggagattgagaaagcaataagagaaattatggattccgagagtgaaattcgggtgaaggtgaaagagatgaaggagaagagcagagcagcacaaatggaaggtggctcttcttacacttctattggaggtttcatccaaattatcatggagaattctcaataa

SEQ ID NO: 9219 - protein, 470 aa, Nicotiana tabacum
MVQPHVLLVTFPAQGHINPCLQFAKRLIRMGIEVTFATSVFAHRRMAKTTTSTLSKGLNFAAFSDGYDDGFKADEHDSQHYMSEIKSRGSKTLKDIILKSSDEGRPVTSLVYSLLLPWAAKVAREFHIPCALLWIQPATVLDIYYYYFNGYEDAIKGSTNDPNWCIQLPRLPLLKSQDLPSFLLSSSNEEKYSFALPTFKEQLDTLDVEENPKVLVNTFDALEPKELKAIEKYNLIGIGPLIPSTFLDGKDPLDSSFGGDLFQKSNDYIEWLNSKANSSVVYISFGSLLNLSKNQKEEIAKGLIEIKKPFLWVIRDQENGKGDEKEEKLSCMMELEKQGKIVPWCSQLEVLTHPSIGCFVSHCGWNSTLESLSSGVSVVAFPHWTDQGTNAKLIEDVWKTGVRLKKNEDGVVESEEIKRCIEMVMDGGEKGEEMRRNAQKWKELAREAVKEGGSSEMNLKAFVQEVGKGC

SEQ ID NO: 9220 - DNA, 1413 bp, Nicotiana tabacum
atggtgcaaccccatgtcctcttggtgacttttccagcacaaggccatattaatccatgtctccaatttgccaagaggctaattagaatgggcattgaggtaacttttgccacgagcgttttcgcccatcgtcgtatggcaaaaactacgacttccactctatccaagggcttaaattttgcggcattctctgatgggtacgacgatggtttcaaggccgatgagcatgattctcaacattacatgtcggagataaaaagtcgcggttctaaaaccctaaaagatatcattttgaagagctcagacgagggacgtcctgtgacatccctcgtctattctcttttgcttccatgggctgcaaaggtagcgcgtgaatttcacataccgtgcgcgttactatggattcaaccagcaactgtgctagacatatattattattacttcaatggctatgaggatgccataaaaggtagcaccaatgatccaaattggtgtattcaattgcctaggcttccactactaaaaagccaagatcttccttcttttttactttcttctagtaatgaagaaaaatatagctttgctctaccaacatttaaagagcaacttgacacattagatgttgaagaaaatcctaaagtacttgtgaacacatttgatgcattagagccaaaggaactcaaagctattgaaaagtacaatttaattgggattggaccattgattccttcaacatttttggacggaaaagaccctttggattcttcctttggtggtgatctttttcaaaagtctaatgactatattgaatggttgaactcaaaggctaactcatctgtggtttatatctcatttgggagtctcttgaatttgtcaaaaaatcaaaaggaggagattgcaaaagggttgatagagattaaaaagccattcttgtgggtaataagagatcaagaaaatggtaagggagatgaaaaagaagagaaattaagttgtatgatggagttggaaaagcaagggaaaatagtaccatggtgttcacaacttgaagtcttaacacatccatctataggatgtttcgtgtcacattgtggatggaattcgactctggaaagtttatcgtcaggcgtgtcagtagtggcatttcctcattggacggatcaagggacaaatgctaaactaattgaagatgtttggaagacaggtgtaaggttgaaaaagaatgaagatggtgtggttgagagtgaagagataaaaaggtgcatagaaatggtaatggatggtggagagaaaggagaagaaatgagaagaaatgctcaaaaatggaaagaattggcaagggaagctgtaaaagaaggcggatcttcggaaatgaatctaaaagcttttgttcaagaagttggcaaaggttgctga

SEQ ID NO: 9221 - protein, 28 aa, Cannabis sativa
MNCSAFSFWFVCKIIFFFLSFHIQISIA

SEQ ID NO: 9222 - protein, 28 aa, Cannabis sativa
MKCSTFSFWFVCKIIFFFFSFNIQTSIA

SEQ ID NO: 9223 - protein, 545 aa, Cannabis sativa
MNCSAFSFWFVCKIIFFFLSFHIQISIANPRENFLKCFSKHIPNNVANPKLVYTQHDQLYMSILNSTIQNLRFISDTTPKPLVIVTPSNNSHIQATILCSKKVGLQIRTRSGGHDAEGMSYISQVPFVVVDLRNMHSIKIDVHSQTAWVEAGATLGEVYYWINEKNENLSFPGGYCPTVGVGGHFSGGGYGALMRNYGLAADNIIDAHLVNVDGKVLDRKSMGEDLFWAIRGGGGENFGIIAAWKIKLVDVPSKSTIFSVKKNMEIHGLVKLFNKWQNIAYKYDKDLVLMTHFITKNITDNHGKNKTTVHGYFSSIFHGGVDSLVDLMNKSFPELGIKKTDCKEFSWIDTTIFYSGVVNFNTANFKKEILLDRSAGKKTAFSIKLDYVKKPIPETAMVKILEKLYEEDVGAGMYVLYPYGGIMEEISESAIPFPHRAGIMYELWYTASWEKQEDNEKHINWVRSVYNFTTPYVSQNPRLAYLNYRDLDLGKTNHASPNNYTQARIWGEKYFGKNFNRLVKVKTKVDPNNFFRNEQSIPPLPPHHH

SEQ ID NO: 9224 - protein, 462 aa, Humulus lupulus
MGRAPCCEKVGLKKGRWTSEEDEILTKYIQSNGEGCWRSLPKNAGLLRCGKSCRLRWINYLRADLKRGNISSEEEDIIIKLHSTLGNRWSLIASHLPGRTDNEIKNYWNSHLSRKIHTFRRCNNTTTHHHHLPNLVTVTKVNLPIPKRKGGRTSRLAMKKNKSSTSNQNSSVIKNDVGSSSSTTTTSVHQRTTTTTPTMDDQQKRQLSRCRLEEKEDQDGASTGTVVMMLGQAAAVGSSCDEDMLGHDQLSFLCCSEEKTTENSMTNLKENGDHEVSGPYDYDHRYEKETSVDEGMLLCFNDIIDSNLLNPNEVLTLSEESLNLGGALMDTTTSTTTNNNNYSLSYNNNGDCVISDDHDQYWLDDVVGVDFWSWESSTTVTQEQEQEQEQEQEQEQEQEQEQEHHHQQDQKKNTWDNEKEKMLALLWDSDNSNWELQDNNNYHKCQEITSDKENAMVAWLLS

SEQ ID NO: 9225 - protein, 371 aa, Arabidopsis thaliana
MGRAPCCEKVGIKRGRWTAEEDQILSNYIQSNGEGSWRSLPKNAGLKRCGKSCRLRWINYLRSDLKRGNITPEEEELVVKLHSTLGNRWSLIAGHLPGRTDNEIKNYWNSHLSRKLHNFIRKPSISQDVSAVIMTNASSAPPPPQAKRRLGRTSRSAMKPKIHRTKTRKTKKTSAPPEPNADVAGADKEALMVESSGAEAELGRPCDYYGDDCNKNLMSINGDNGVLTFDDDIIDLLLDESDPGHLYTNTTCGGDGELHNIRDSEGARGFSDTWNQGNLDCLLQSCPSVESFLNYDHQVNDASTDEFIDWDCVWQEGSDNNLWHEKENPDSMVSWLLDGDDEATIGNSNCENFGEPLDHDDESALVAWLLS

SEQ ID NO: 9226 - protein, 243 aa, Arabidopsis thaliana
MNISRTEFANCKTLINHKEEVEEVEKKMEIEIRRGPWTVEEDMKLVSYISLHGEGRWNSLSRSAGLNRTGKSCRLRWLNYLRPDIRRGDISLQEQFIILELHSRWGNRWSKIAQHLPGRTDNEIKNYWRTRVQKHAKLLKCDVNSKQFKDTIKHLWMPRLIERIAATQSVQFTSNHYSPENSSVATATSSTSSSEAVRSSFYGGDQVEFGTLDHMTNGGYWFNGGDTFETLCSFDELNKWLIQ

SEQ ID NO: 9227 - protein, 517 aa, Cannabis sativa
NPRENFLKCFSKHIPNNVANPKLVYTQHDQLYMSILNSTIQNLRFISDTTPKPLVIVTPSNNSHIQATILCSKKVGLQIRTRSGGHDAEGMSYISQVPFVVVDLRNMHSIKIDVHSQTAWVEAGATLGEVYYWINEKNENLSFPGGYCPTVGVGGHFSGGGYGALMRNYGLAADNIIDAHLVNVDGKVLDRKSMGEDLFWAIRGGGGENFGIIAAWKIKLVDVPSKSTIFSVKKNMEIHGLVKLFNKWQNIAYKYDKDLVLMTHFITKNITDNHGKNKTTVHGYFSSIFHGGVDSLVDLMNKSFPELGIKKTDCKEFSWIDTTIFYSGVVNFNTANFKKEILLDRSAGKKTAFSIKLDYVKKPIPETAMVKILEKLYEEDVGAGMYVLYPYGGIMEEISESAIPFPHRAGIMYELWYTASWEKQEDNEKHINWVRSVYNFTTPYVSQNPRLAYLNYRDLDLGKTNHASPNNYTQARIWGEKYFGKNFNRLVKVKTKVDPNNFFRNEQSIPPLPPHHH

SEQ ID NO: 9228 - protein, 520 aa, Arabidopsis thaliana
MNCSAFSFWFVCKIIFFFLSFHIQISIAMDPYKYRPASSYNSPFFTTNSGAPVWNNNSSMTVGPRGLILLEDYHLVEKLANFDRERIPERVVHARGASAKGFFEVTHDISNLTCADFLRAPGVQTPVIVRFSTVIHARGSPETLRDPRGFAVKFYTREGNFDLVGNNFPVFFIRDGMKFPDIVHALKPNPKSHIQENWRILDFFSHHPESLNMFTFLFDDIGIPQDYRHMDGSGVNTYMLINKAGKAHYVKFHWKPTCGVKSLLEEDAIRLGGTNHSHATQDLYDSIAAGNYPEWKLFIQIIDPADEDKFDFDPLDVTKTWPEDILPLQPVGRMVLNKNIDNFFAENEQLAFCPAIIVPGIHYSDDKLLQTRVFSYADTQRHRLGPNYLQLPVNAPKCAHHNNHHEGFMNFMHRDEEVNYFPSRYDQVRHAEKYPTPPAVCSGKRERCIIEKENNFKEPGERYRTFTPERQERFIQRWIDALSDPRITHEIRSIWISYWSQADKSLGQKLASRLNVRPSI

SEQ ID NO: 9229 - protein, 520 aa, Arabidopsis thaliana
MKCSTFSFWFVCKIIFFFFSFNIQTSIAMDPYKYRPASSYNSPFFTTNSGAPVWNNNSSMTVGPRGLILLEDYHLVEKLANFDRERIPERVVHARGASAKGFFEVTHDISNLTCADFLRAPGVQTPVIVRFSTVIHARGSPETLRDPRGFAVKFYTREGNFDLVGNNFPVFFIRDGMKFPDIVHALKPNPKSHIQENWRILDFFSHHPESLNMFTFLFDDIGIPQDYRHMDGSGVNTYMLINKAGKAHYVKFHWKPTCGVKSLLEEDAIRLGGTNHSHATQDLYDSIAAGNYPEWKLFIQIIDPADEDKFDFDPLDVTKTWPEDILPLQPVGRMVLNKNIDNFFAENEQLAFCPAIIVPGIHYSDDKLLQTRVFSYADTQRHRLGPNYLQLPVNAPKCAHHNNHHEGFMNFMHRDEEVNYFPSRYDQVRHAEKYPTPPAVCSGKRERCIIEKENNFKEPGERYRTFTPERQERFIQRWIDALSDPRITHEIRSIWISYWSQADKSLGQKLASRLNVRPSI

SEQ ID NO: 9230 - protein, 781 aa, Escherichia coli
MNCSAFSFWFVCKIIFFFLSFHIQISIAMSQHNEKNPHQHQSPLHDSSEAKPGMDSLAPEDGSHRPAAEPTPPGAQPTAPGSLKAPDTRNEKLNSLEDVRKGSENYALTTNQGVRIADDQNSLRAGSRGPTLLEDFILREKITHFDHERIPERIVHARGSAAHGYFQPYKSLSDITKADFLSDPNKITPVFVRFSTVQGGAGSADTVRDIRGFATKFYTEEGIFDLVGNNTPIFFIQDAHKFPDFVHAVKPEPHWAIPQGQSAHDTFWDYVSLQPETLHNVMWAMSDRGIPRSYRTMEGFGIHTFRLINAEGKATFVRFHWKPLAGKASLVWDEAQKLTGRDPDFHRRELWEAIEAGDFPEYELGFQLIPEEDEFKFDFDLLDPTKLIPEELVPVQRVGKMVLNRNPDNFFAENEQAAFHPGHIVPGLDFTNDPLLQGRLFSYTDTQISRLGGPNFHEIPINRPTCPYHNFQRDGMHRMGIDTNPANYEPNSINDNWPRETPPGPKRGGFESYQERVEGNKVRERSPSFGEYYSHPRLFWLSQTPFEQRHIVDGFSFELSKVVRPYIRERVVDQLAHIDLTLAQAVAKNLGIELTDDQLNITPPPDVNGLKKDPSLSLYAIPDGDVKGRVVAILLNDEVRSADLLAILKALKAKGVHAKLLYSRMGEVTADDGTVLPIAATFAGAPSLTVDAVIVPCGNIADIADNGDANYYLMEAYKHLKPIALAGDARKFKATIKIADQGEEGIVEADSADGSFMDELLTLMAAHRVWSRIPKIDKIPA

SEQ ID NO: 9231 - protein, 781 aa, Escherichia coli
MKCSTFSFWFVCKIIFFFFSFNIQTSIAMSQHNEKNPHQHQSPLHDSSEAKPGMDSLAPEDGSHRPAAEPTPPGAQPTAPGSLKAPDTRNEKLNSLEDVRKGSENYALTTNQGVRIADDQNSLRAGSRGPTLLEDFILREKITHFDHERIPERIVHARGSAAHGYFQPYKSLSDITKADFLSDPNKITPVFVRFSTVQGGAGSADTVRDIRGFATKFYTEEGIFDLVGNNTPIFFIQDAHKFPDFVHAVKPEPHWAIPQGQSAHDTFWDYVSLQPETLHNVMWAMSDRGIPRSYRTMEGFGIHTFRLINAEGKATFVRFHWKPLAGKASLVWDEAQKLTGRDPDFHRRELWEAIEAGDFPEYELGFQLIPEEDEFKFDFDLLDPTKLIPEELVPVQRVGKMVLNRNPDNFFAENEQAAFHPGHIVPGLDFTNDPLLQGRLFSYTDTQISRLGGPNFHEIPINRPTCPYHNFQRDGMHRMGIDTNPANYEPNSINDNWPRETPPGPKRGGFESYQERVEGNKVRERSPSFGEYYSHPRLFWLSQTPFEQRHIVDGFSFELSKVVRPYIRERVVDQLAHIDLTLAQAVAKNLGIELTDDQLNITPPPDVNGLKKDPSLSLYAIPDGDVKGRVVAILLNDEVRSADLLAILKALKAKGVHAKLLYSRMGEVTADDGTVLPIAATFAGAPSLTVDAVIVPCGNIADIADNGDANYYLMEAYKHLKPIALAGDARKFKATIKIADQGEEGIVEADSADGSFMDELLTLMAAHRVWSRIPKIDKIPA

SEQ ID NO: 9232 - DNA, 1437 bp, Nicotiana tabacum
atgaaaacaacagaacttgtcttcatacccgcccccggtatgggtcaccttgtacccacagtcgaagtcgccaaacaactagttgatagagacgaacagttgtctattaccgtcttgataatgacgttacccctggagactaatatcccaagttacaccaagagtttgtcctctgactattcatcccgtatcacgttgttacaactaagtcaacctgagacgagtgtctcaatgagtagttttaacgccataaacttcttcgaatacattagttcctataaggatcgtgttaaagatgccgtaaacgagacattctcctcttcatcctccgtcaaacttaaaggatttgtaatcgacatgttttgcacggcaatgatagacgtggccaacgagttcggtattccatcttatgtattctacacgtccaacgctgccatgctaggcctacaacttcacttccaatccttgtccatcgaatattcacctaaggttcataattatttagaccctgaatctgaggtagctatatcaacgtacattaacccaataccagtaaaatgcttacccggtataattcttgacaatgataagagtggcactatgttcgtaaaccatgccaggagattccgtgaaacaaagggtataatggtaaatacttttgcagaattagaaagtcacgccctaaaggcacttagtgacgatgagaaaattcctccaatctatcccgtcggacccattctaaacttgggtgatggtaatgaggatcataaccaagagtacgacatgataatgaaatggctggatgaacaaccacacagttcagtggttttcctgtgcttcggttccaaaggttcatttgaagaagaccaggttaaagagatagcaaatgctttagagagatcaggcaataggttcctgtggagtttaagacgtccccctcccaaggatactcttcaattcccttccgaatttgaaaaccccgaggaagtgctacctgtaggattttttcaaagaaccaaaggcagaggaaaagtcatcggatgggcaccacagcttgcaattctatctcaccctgccgtcggtggattcgtttcccactgcggctggaatagtactttggaatcagttagatcaggtgtacccatagcaacatggcctctttatgcagagcagcagtccaatgcatttcaattggtcaaggatctaggtatggccgtcgaaattaaaatggattaccgtgaggactttaacaagactaatcctccattggtaaaggcagaggaaatagaagacggcattaggaagttgatggactccgagaataagattagggcaaaggtgatggaaatgaaagataagtccagagctgcattactggaaggaggatcctcctatgttgcactgggtcacttcgtggagaccgtaatgaagaactaa

SEQ ID NO: 9233 - protein, 478 aa, Nicotiana tabacum; identical to SEQ ID NO: 6192

SEQ ID NO: 9234 - DNA, 1413 bp, Nicotiana tabacum
atggttcaaccacacgtcttactggttacttttccagcacaaggccatatcaacccttgcctacaattcgccaaaagactaataaggatgggcatcgaagtaacttttgccacgagtgtattcgcacataggcgtatggctaaaactacgacatcaactttgtccaaaggactaaacttcgccgccttcagtgatggctatgacgatggattcaaagccgacgaacatgacagtcaacactacatgagtgaaataaagtcccgtggatctaaaacacttaaggatattatacttaaatcctccgatgagggaagacccgttacctctttagtttattcactgttactgccctgggctgcaaaagtcgccagagagtttcatattccttgcgctttattgtggatccaaccagctacggtattagacatctactattactacttcaatggatacgaggatgcaataaagggatcaacaaacgaccccaactggtgtattcaactgcctagacttcctctattaaaaagtcaggacttacctagttttttactgtcatccagtaacgaagaaaaatattcattcgctttacccaccttcaaagagcagcttgacactttggatgttgaagagaaccccaaggttttggtcaatacttttgacgctttggagccaaaagagctaaaggctattgaaaaatataaccttatcggcataggacctttaatcccctctactttcttagatggcaaagaccctctagattcaagtttcggaggtgatttgtttcaaaagagtaacgattatatcgagtggctaaatagtaaagccaactccagtgtggtctacatttctttcggaagtcttctgaatttatcaaaaaaccaaaaggaagagatcgcaaaaggactgatagagataaaaaaacctttcttatgggtgatcagagaccaggaaaacggtaaaggcgatgagaaggaggaaaaactgtcctgtatgatggagctagagaaacaaggaaaaatcgttccctggtgttcacagttagaagtgttaacccatccatccataggttgcttcgtatcacattgtggttggaatagtacacttgaaagtctttcatcaggcgtctctgtcgtcgcattcccccactggacggaccagggcacaaacgccaaactgatcgaagatgtatggaagacgggcgtcaggctaaaaaaaaatgaggatggcgtggtagagagtgaagagataaagcgttgcatagaaatggtcatggatggcggtgaaaagggagaggaaatgaggcgtaacgcacaaaagtggaaggaactagcccgtgaagcagtgaaagaaggaggttctagtgagatgaatttaaaagctttcgtgcaggaagttggaaaaggctgctga

SEQ ID NO: 9235 - protein, 470 aa, Nicotiana tabacum; identical to SEQ ID NO: 9219

SEQ ID NO: 9236 - DNA, 1449 bp, Nicotiana tabacum
atgaaagagactaaaaaaattgagttagtttttatccccagtcctggtataggacacttagtctcaactgtggagatggccaaactgttgatagcccgtgaagagcaactttctattactgtcctgattatacaatggcctaatgataaaaagctagacagttatatccagtccgtcgcaaactttagttctagactgaagtttatacgtctgccccaagatgactcaatcatgcaacttttgaaatcaaacattttcacgacattcatcgcctctcacaagccagctgtaagagacgccgttgctgacatactaaagagtgaaagtaataacacattggcaggcattgtaatcgatcttttctgcacatccatgatcgatgtagccaatgagtttgagctgcctacttatgtgttttacactagtggcgcagccacgttgggtctgcactaccatattcaaaatctgcgtgatgagtttaataaagacattaccaaatataaggatgagccagaagaaaaattaagtatagccacgtaccttaacccattccctgctaagtgtctaccctccgtggcattggataaggaaggaggatcaacgatgttcctagacttagctaagaggttcagggagaccaaaggcataatgattaacacttttcttgagctggaatcatacgctctaaactcattgtctagagataaaaacttgccccctatataccctgtaggccctgttttgaacttgaacaacgttgagggtgataacttgggctctagtgatcaaaataccatgaaatggctggacgaccagccagcttcttccgttgtgttcctatgttttggctcaggaggaagtttcgaaaaacaccaagtcaaagaaatagcttatgccttagaatcttccggatgcaggttcttgtggagtttgcgtagaccccccacggaagatgctaggttcccttctaattacgaaaacttagaggaaattttaccagagggatttctggaaagaacgaaaggcattggtaaggtcattggatgggccccacagttagcaatcttgtctcacaagtccacaggaggattcgtgtctcattgcggatggaactctacccttgaaagtacctatttcggcgttcctattgctacttggccaatgtatgctgaacaacaggccaacgcttttcaacttgttaaagatttgaggatgggtgttgagatcaaaatggattataggaaggatatgaaggtaatgggcaaggaggttatcgttaaggcagaagaaattgaaaaggccataagggaaatcatggactcagaatcagaaatcagggtcaaggtcaaagagatgaaggagaaaagtcgtgcagcccaaatggaaggaggatcatcatatacctctatcggcggcttcattcaaataatcatggagaactcacagtaa

SEQ ID NO: 9237 - protein, 482 aa, Nicotiana tabacum; identical to SEQ ID NO: 5908

SEQ ID NO: 9238 - DNA, 1491 bp, Nicotiana tabacum
atggctactcaggtgcataaattgcatttcattctgttcccactgatggctcccggtcacatgatccctatgatagacatcgcaaaactattggctaaccgtggcgtgataactaccataataactacgcccgttaacgccaatcgtttttcctctacgatcactagggccattaaatcaggcctaagaatccagattttaaccttaaaattcccatcagttgaggtaggcctgcctgaaggatgtgaaaacatcgacatgttgccatctttggacttagcctctaaattctttgctgctatttctatgcttaaacaacaagtggagaacttgctagagggtattaaccctagtccctcatgcgttatttctgacatgggcttcccatggacgacacagatcgctcaaaatttcaatattcctcgtatcgtatttcatggcacgtgttgcttttctcttctttgttcttacaaaatcctgtcatccaatatcttagagaacattactagtgactcagagtattttgtcgtgccagatctgccagaccgtgtcgagctaactaaggcccaagtctctggatctacaaagaatactacatcagtaagtagttcagtactgaaggaggttacagagcagatcaggcttgcagaggaatcatcctacggtgtgatagttaattccttcgaagaactggaacaggtgtatgaaaaagagtacagaaaagccaggggcaaaaaggtctggtgcgtgggtcctgtctctttgtgcaacaaggagattgaagatcttgttactagaggaaacaaaaccgctatagacaatcaggattgtcttaagtggttagacaacttcgagactgaatccgtcgtctatgcaagtttaggctcactaagtaggcttacgttactgcaaatggttgagctgggattgggactggaggagagtaataggccatttgtatgggttctgggaggaggagacaaactaaatgatcttgagaaatggatattggagaatggctttgaacagcgtataaaggagagaggtgtcctgatacgtggctgggcacctcaagtattgattttaagtcaccccgcaattggaggagttttaacgcattgtggatggaactctacattagagggcatttcagccggactacccatggtcacctggccactatttgccgaacagttctgtaacgaaaaattagtagtgcaggttcttaaaatcggtgtctcacttggagtgaaggtccctgttaagtggggtgacgaagagaacgtaggtgtcttagtgaaaaaggatgacgttaaaaaagcactggataagctaatggatgagggtgaggagggccaggttaggaggaccaaagccaaagagcttggtgagttagctaaaaaagcctttggagagggcggatcatcctacgtgaacctaacgtccctaattgaagatataatcgagcagcagaaccataaggagaagtag

SEQ ID NO: 9239 - protein, 496 aa, Nicotiana tabacum; identical to SEQ ID NO: 9211

SEQ ID NO: 9240 - DNA, 1458 bp, Nicotiana tabacum
atgggctctatcggtgcagaactaaccaagccacacgccgtatgcattccctatcccgcccagggacacataaatcctatgctgaagttagctaagatactgcatcacaagggcttccatataaccttcgtaaatacggaatttaatcacaggcgtctgctgaagtccagaggtcctgactccctgaaaggtctttcaagtttcaggttcgagacgatacctgacggactgcccccatgcgaagctgacgctacacaggacattccttcactgtgtgaatccacgactaatacatgtctagctccttttagagacctacttgctaagctaaatgatacgaatacttctaacgtccctcccgtaagttgtattgtcagtgacggagtgatgtcatttacccttgcagctgcacaggaactgggtgtcccagaggttttattttggactacatctgcttgtggattcttaggttacatgcactattgcaaagtcattgaaaaaggatatgctccattaaaagacgcatcagacctgacgaatggctatcttgagacaaccttggacttcatccccggcatgaaggacgtcaggctgagagacttaccttcctttcttaggaccaccaatccagacgaatttatgattaagtttgtactacaggaaactgagcgtgctcgtaaggccagtgccataatacttaatacctttgaaaccttagaggcagaggtattagaatcattaaggaaccttctaccccccgtctatccaatcggccccttgcatttccttgtcaaacacgtagacgatgagaacctaaaaggtctacgttcctcactttggaaggaggaacctgaatgtattcaatggttagacaccaaagaacctaactctgtcgtgtacgtgaatttcggatccattactgtgatgactcccaatcaattaatagagttcgcttggggactggcaaactctcaacagaccttcctttggatcataaggcctgacatcgtaagtggtgatgcttccatattacctcccgagtttgttgaggagactaagaacagaggcatgcttgcctcctggtgctctcaggaggaggtactatcccatcccgcaatagtgggatttttgacgcactctggttggaactcaactttagaatcaatttctagtggcgtccccatgatctgttggcctttctttgctgagcagcaaacgaactgctggttttcagtgacgaagtgggacgttggaatggaaattgattcagatgtgaagagagatgaagtagagagtttagtaagagagttaatggtgggtggtaaaggcaagaagatgaagaagaaggcaatggagtggaaggaactggccgaggcttcagcaaaagaacactctggctcctcttacgtcaatatcgagaagttggttaacgatatattactatctagtaagcactaa

SEQ ID NO: 9241 - protein, 485 aa, Nicotiana tabacum; identical to SEQ ID NO: 9207

SEQ ID NO: 9242 - DNA, 1377 bp, Stevia rebaudiana
atggagaacaaaaccgagacaaccgttaggcgtagacgtaggataatattgtttcccgtgccctttcaaggccatataaacccaatcctgcagctagccaacgtattgtactcaaagggcttcagtataacgatcttccacaccaactttaataagccaaaaacgtctaattatccacacttcacatttagatttatacttgataacgacccacaggatgaaagaatatcaaacttgcccacgcacggcccactagccggaatgagaataccaataatcaatgagcatggcgccgacgagttgcgtagagagctggaattgttgatgctagccagtgaggaagacgaagaggtgtcctgcttaataacggatgcactttggtattttgctcaatctgtggccgactcccttaacctgaggcgtcttgtccttatgacctccagtctattcaactttcatgcccatgtctcattgccccaatttgatgagcttggctatttggatcctgatgacaaaactaggctggaggaacaggcttccggttttcccatgctaaaggttaaggacatcaaatccgcctactcaaactggcagatccttaaggaaattcttggcaaaatgatcaaacagacgagggcatccagtggcgtcatctggaactcctttaaggaacttgaagaatcagaacttgaaacagtaatcagagaaatacctgccccaagtttcttgatccctctacctaagcaccttacggcttctagttcttctttgttggaccacgatcgtactgtctttcaatggttagatcagcaacccccctcatcagtgctatatgtgtcattcggtagtacatcagaagtggacgaaaaggatttccttgagatagcccgtggattggtggactctaaacagtcctttttatgggttgtgagacctggatttgtaaagggatccacgtgggtcgaacccttgcccgatggtttcctgggtgaaagaggaaggatagtgaagtgggtccctcagcaagaggtactggcccatggtgctataggtgctttctggacccactccggctggaatagtacactagaatccgtttgcgagggtgtccctatgattttttctgattttggtttagatcaacccctgaatgctaggtacatgtcagacgtccttaaagtcggcgtctacctagaaaatggctgggagaggggtgagatagcaaacgctatcagacgtgttatggtagacgaagagggagagtacataaggcaaaacgccagggtcctgaaacaaaaagccgatgtgtccttgatgaagggcggctcttcatacgaaagtctagaaagtcttgtttcttatatttcctcactataa

SEQ ID NO: 9243 - protein, 458 aa, Stevia rebaudiana; identical to SEQ ID NO: 9189

SEQ ID NO: 9244 - DNA, 1434 bp, Lycium barbarum
atgggtcaattgcatttttttttgtttccaatgatggctcaaggtcatatgattccaactttggatatggctaagttgattgcttctagaggtgttaaggctactattattactactccattgaacgaatctgttttttctaaggctattcaaagaaacaagcaattgggtattgaaattgaaattgaaattagattgattaagtttccagctttggaaaacgatttgccagaagattgtgaaagattggatttgattccaactgaagctcatttgccaaacttttttaaggctgctgctatgatgcaagaaccattggaacaattgattcaagaatgtagaccagattgtttggtttctgatatgtttttgccatggactactgatactgctgctaagtttaacattccaagaattgtttttcatggtactaactactttgctttgtgtgttggtgattctatgagaagaaacaagccatttaagaacgtttcttctgattctgaaacttttgttgttccaaacttgccacatgaaattaagttgactagaactcaagtttctccatttgaacaatctgatgaagaatctgttatgtctagagttttgaaggaagttagagaatctgatttgaagtcttacggtgttatttttaactctttttacgaattggaaccagattacgttgaacattacactaaggttatgggtagaaagtcttgggctattggtccattgtctttgtgtaacagagatgttgaagataaggctgaaagaggtaagaagtcttctattgataagcatgaatgtttggaatggttggattctaagaagccatcttctattgtttacgtttgttttggttctgttgctaactttactgttactcaaatgagagaattggctttgggtttggaagcttctggtttggattttatttgggctgttagagctgataacgaagattggttgccagaaggttttgaagaaagaactaaggaaaagggtttgattattagaggttgggctccacaagttttgattttggatcatgaatctgttggtgcttttgttactcattgtggttggaactctactttggaaggtatttctgctggtgttccaatggttacttggccagtttttgctgaacaattttttaacgaaaagttggttactcaagttatgagaactggtgctggtgttggttctgttcaatggaagagatctgcttctgaaggtgttgaaaaggaagctattgctaaggctattaagagagttatggtttctgaagaagctgaaggttttagaaacagagctagagcttacaaggaaatggctagacaagctattgaagaaggtggttcttcttacactggtttgactactttgttggaagatatttcttcttacgaatctttgtcttctgattaa

SEQ ID NO: 9245 - protein, 477 aa, Lycium barbarum
MGQLHFFLFPMMAQGHMIPTLDMAKLIASRGVKATIITTPLNESVFSKAIQRNKQLGIEIEIEIRLIKFPALENDLPEDCERLDLIPTEAHLPNFFKAAAMMQEPLEQLIQECRPDCLVSDMFLPWTTDTAAKFNIPRIVFHGTNYFALCVGDSMRRNKPFKNVSSDSETFVVPNLPHEIKLTRTQVSPFEQSDEESVMSRVLKEVRESDLKSYGVIFNSFYELEPDYVEHYTKVMGRKSWAIGPLSLCNRDVEDKAERGKKSSIDKHECLEWLDSKKPSSIVYVCFGSVANFTVTQMRELALGLEASGLDFIWAVRADNEDWLPEGFEERTKEKGLIIRGWAPQVLILDHESVGAFVTHCGWNSTLEGISAGVPMVTWPVFAEQFFNEKLVTQVMRTGAGVGSVQWKRSASEGVEKEAIAKAIKRVMVSEEAEGFRNRARAYKEMARQAIEEGGSSYTGLTTLLEDISSYESLSSD

SEQ ID NO: 9246 - DNA, 2262 bp, Escherichia coli
atgtctcaacataacgagaaaaacccacatcagcatcaatcaccactacatgactcctctgaagcaaagccaggaatggactccctggctcctgaagatggctctcaccgtcccgctgccgaacctacgccacccggcgcacagccaactgcccccggttccctaaaggcccctgacacaagaaatgaaaagttaaattctcttgaagacgtgcgtaaaggcagtgaaaattacgctcttaccactaatcaaggcgtaaggatagctgacgaccaaaactccctgcgtgctggctctagaggccctacccttcttgaggattttatccttcgtgaaaagattactcacttcgatcacgaaaggattcctgagaggatcgtccatgctagaggttctgctgctcacggttattttcagccctataaatccctttccgacataacgaaggcagattttttgagtgatcctaataaaataacgcctgtatttgttagattttctactgtccaaggtggtgctggatcagctgacactgttagagacatcaggggatttgctacgaagttttacactgaagagggcatcttcgacttggttggtaataatacaccaatattctttatccaagacgcacacaaattcccagactttgtgcatgctgtcaaacccgagccacattgggctattccacagggccagtctgcccatgacacgttctgggattacgtttctctgcaacctgagacgctgcacaacgttatgtgggcaatgtcagatcgtggaatacctagatcttacaggacaatggaaggctttggcatacatactttcaggttaataaatgccgaaggaaaggccacattcgtcaggtttcattggaagcccttagcaggtaaggcctctctagtatgggacgaagctcaaaaacttactggtagagatccagactttcataggcgtgaattgtgggaagcaatcgaagccggcgactttcctgagtatgagctgggcttccagttgatcccagaagaggacgaatttaaatttgatttcgacttacttgatccaacgaaactgattcccgaggagttggtccctgtccaacgtgtcggtaaaatggtgttgaacaggaaccctgacaatttctttgcagaaaacgaacaagccgccttccatccaggccatatagtaccaggcttagacttcactaatgacccactgctgcaaggtagactgtttagttacactgatacacagatatccagactaggtggtccaaacttccatgaaatccccatcaacaggcccacgtgcccctatcacaatttccagcgtgatggcatgcatagaatgggtattgacacgaatcccgctaattatgagccaaactctataaacgataactggcctagagagacgccaccaggccctaagcgtggtggttttgaatcctatcaagagcgtgtcgaaggtaataaagtaagggagagatcaccctctttcggcgaatattatagtcatccccgtttgttttggttatcacagacgcctttcgaacaacgtcacatagttgatggattctcttttgagctttcaaaagtggttcgtccctatatcagggaaagggttgtcgaccagcttgcccatattgatttaacacttgcacaagctgttgccaaaaacctaggaatagagctgacagacgatcaactaaatatcaccccacctcctgatgtcaacggcttaaagaaggatccatctttaagtctatacgcaattcccgacggtgatgttaaaggtagagtggtagcaattttgctaaacgatgaagtgcgtagtgctgacctactagccatcttaaaggccttgaaagcaaagggagtgcacgcaaagttactgtacagtcgtatgggagaggttactgctgacgacggtacggtactacctatcgccgcaacatttgccggagccccaagtttgacagtcgatgccgttatcgtaccttgtggtaatatcgccgatattgccgacaacggagacgctaattactacttaatggaggcctataagcacttgaagcccatagcactggctggagacgctcgtaaatttaaggctactatcaagattgcagatcagggcgaggagggtattgttgaggcagacagtgcagatggatctttcatggatgagcttctaacactaatggcagcacatagagtatggtctcgtatccccaagatcgacaaaatccctgcgtaa

SEQ ID NO: 9247 - protein, 753 aa, Escherichia coli; identical to SEQ ID NO: 9197

SEQ ID NO: 9248 - DNA, 1974 bp, Mus musculus
atgtcttcttctaacgatcatgttttggttccaatgtctcaaagaaacaacaacggtttgccaagaatgaactctagagctgttagaactttggctgaaggtgatgttttgtcttttcatcatattacttacagagttaaggttaagtctggttttttggttagaaagactgttgaaaaggaaattttgtctgatattaacggtattatgaagccaggtttgaacgctattttgggtccaactggtggtggtaagtcttctttgttggatgttttggctgctagaaaggatccaaagggtttgtctggtgatgttttgattaacggtgctccacaaccagctcattttaagtgttgttctggttacgttgttcaagatgatgttgttatgggtactttgactgttagagaaaacttgcaattttctgctgctttgagattgccaactactatgaagaaccatgaaaagaacgaaagaattaacactattattaaggaattgggtttggaaaaggttgctgattctaaggttggtactcaatttattagaggtatttctggtggtgaaagaaagagaacttctattggtatggaattgattactgatccatctattttgtttttggatgaaccaactactggtttggattcttctactgctaacgctgttttgttgttgttgaagagaatgtctaagcaaggtagaactattattttttctattcatcaaccaagatactctatttttaagttgtttgattctttgactttgttggcttctggtaagttggtttttcatggtccagctcaaaaggctttggaatactttgcttctgctggttaccattgtgaaccatacaacaacccagctgatttttttttggatgttattaacggtgattcttctgctgttatgttgaacagagaagaacaagataacgaagctaacaagactgaagaaccatctaagggtgaaaagccagttattgaaaacttgtctgaattttacattaactctgctatttacggtgaaactaaggctgaattggatcaattgccaggtgctcaagaaaagaagggtacttctgcttttaaggaaccagtttacgttacttctttttgtcatcaattgagatggattgctagaagatcttttaagaacttgttgggtaacccacaagcttctgttgctcaattgattgttactgttattttgggtttgattattggtgctatttactttgatttgaagtacgatgctgctggtatgcaaaacagagctggtgttttgttttttttgactactaaccaatgtttttcttctgtttctgctgttgaattgtttgttgttgaaaagaagttgtttattcatgaatacatttctggttactacagagtttcttcttacttttttggtaaggttatgtctgatttgttgccaatgagatttttgccatctgttatttttacttgtattttgtactttatgttgggtttgaagaagactgttgatgctttttttattatgatgtttactttgattatggttgcttacactgcttcttctatggctttggctattgctactggtcaatctgttgtttctgttgctactttgttgatgactattgcttttgtttttatgatgttgttttctggtttgttggttaacttgagaactattggtccatggttgtcttggttgcaatacttttctattccaagatacggttttactgctttgcaatacaacgaatttttgggtcaagaattttgtccaggttttaacgttactgataactctacttgtgttaactcttacgctatttgtactggtaacgaatacttgattaaccaaggtattgaattgtctccatggggtttgtggaagaaccatgttgctttggcttgtatgattattatttttttgactattgcttacttgaagttgttgtttttgaagaagtactcttaa

SEQ ID NO: 9249 - protein, 657 aa, Mus musculus
MSSSNDHVLVPMSQRNNNGLPRMNSRAVRTLAEGDVLSFHHITYRVKVKSGFLVRKTVEKEILSDINGIMKPGLNAILGPTGGGKSSLLDVLAARKDPKGLSGDVLINGAPQPAHFKCCSGYVVQDDVVMGTLTVRENLQFSAALRLPTTMKNHEKNERINTIIKELGLEKVADSKVGTQFIRGISGGERKRTSIGMELITDPSILFLDEPTTGLDSSTANAVLLLLKRMSKQGRTIIFSIHQPRYSIFKLFDSLTLLASGKLVFHGPAQKALEYFASAGYHCEPYNNPADFFLDVINGDSSAVMLNREEQDNEANKTEEPSKGEKPVIENLSEFYINSAIYGETKAELDQLPGAQEKKGTSAFKEPVYVTSFCHQLRWIARRSFKNLLGNPQASVAQLIVTVILGLIIGAIYFDLKYDAAGMQNRAGVLFFLTTNQCFSSVSAVELFVVEKKLFIHEYISGYYRVSSYFFGKVMSDLLPMRFLPSVIFTCILYFMLGLKKTVDAFFIMMFTLIMVAYTASSMALAIATGQSVVSVATLLMTIAFVFMMLFSGLLVNLRTIGPWLSWLQYFSIPRYGFTALQYNEFLGQEFCPGFNVTDNSTCVNSYAICTGNEYLINQGIELSPWGLWKNHVALACMIIIFLTIAYLKLLFLKKYS

SEQ ID NO: 9250 - DNA, 3030 bp, Mus musculus
atgaacttgttttctgctttgtctttggatactttggttttgttggctattattttggttttgttgtacagatacggtactagaactcatggtttgtttaagaagcaaggtattccaggtccaaagccattgccatttttgggtactgttttgaactactacactggtatttggaagtttgatatggaatgttacgaaaagtacggtaagacttggggtttgtttgatggtcaaactccattgttggttattactgatccagaaactattaagaacgttttggttaaggattgtttgtctgtttttactaacagaagagaatttggtccagttggtattatgtctaaggctatttctatttctaaggatgaagaatggaagagatacagagctttgttgtctccaacttttacttctggtagattgaaggaaatgtttccagttattgaacaatacggtgatattttggttaagtacttgagacaagaagctgaaaagggtatgccagttgctatgaaggatgttttgggtgcttactctatggatgttattacttctacttcttttggtgttaacgttgattctttgaacaacccagaagatccatttgttgaagaagctaagaagtttttgagagttgatttttttgatccattgttgttttctgttgttttgtttccattgttgactccagtttacgaaatgttgaacatttgtatgtttccaaacgattctattgaattttttaagaagtttgttgatagaatgcaagaatctagattggattctaaccaaaagcatagagttgattttttgcaattgatgatgaactctcataacaactctaaggataaggattctcataaggctttttctaacatggaaattactgttcaatctattatttttatttctgctggttacgaaactacttcttctactttgtcttttactttgtactgtttggctactcatccagatattcaaaagaagttgcaagctgaaattgataaggctttgccaaacaaggctactccaacttgtgatactgttatggaaatggaatacttggatatggttttgaacgaaactttgagattgtacccaattgttactagattggaaagagtttgtaagaaggatgttgaattgaacggtgtttacattccaaagggttctatggttatgattccatcttacgctttgcatcatgatccacaacattggccagatccagaagaatttcaaccagaaagattttctaaggaaaacaagggttctattgatccatacgtttacttgccatttggtattggtccaagaaactgtattggtatgagatttgctttgatgaacatgaagttggctgttactaaggttttgcaaaacttttcttttcaaccatgtcaagaaactcaaattccattgaagttgtctagacaaggtattttgcaaccagaaaagccaattgttttgaaggttgttccaagagatgctgttattactggtgcttaaatgaacttgttttctgctttgtctttggatactttggttttgttggctattattttggttttgttgtacagatacggtactagaactcatggtttgtttaagaagcaaggtattccaggtccaaagccattgccatttttgggtactgttttgaactactacactggtatttggaagtttgatatggaatgttacgaaaagtacggtaagacttggggtttgtttgatggtcaaactccattgttggttattactgatccagaaactattaagaacgttttggttaaggattgtttgtctgtttttactaacagaagagaatttggtccagttggtattatgtctaaggctatttctatttctaaggatgaagaatggaagagatacagagctttgttgtctccaacttttacttctggtagattgaaggaaatgtttccagttattgaacaatacggtgatattttggttaagtacttgagacaagaagctgaaaagggtatgccagttgctatgaaggatgttttgggtgcttactctatggatgttattacttctacttcttttggtgttaacgttgattctttgaacaacccagaagatccatttgttgaagaagctaagaagtttttgagagttgatttttttgatccattgttgttttctgttgttttgtttccattgttgactccagtttacgaaatgttgaacatttgtatgtttccaaacgattctattgaattttttaagaagtttgttgatagaatgcaagaatctagattggattctaaccaaaagcatagagttgattttttgcaattgatgatgaactctcataacaactctaaggataaggattctcataaggctttttctaacatggaaattactgttcaatctattatttttatttctgctggttacgaaactacttcttctactttgtcttttactttgtactgtttggctactcatccagatattcaaaagaagttgcaagctgaaattgataaggctttgccaaacaaggctactccaacttgtgatactgttatggaaatggaatacttggatatggttttgaacgaaactttgagattgtacccaattgttactagattggaaagagtttgtaagaaggatgttgaattgaacggtgtttacattccaaagggttctatggttatgattccatcttacgctttgcatcatgatccacaacattggccagatccagaagaatttcaaccagaaagattttctaaggaaaacaagggttctattgatccatacgtttacttgccatttggtattggtccaagaaactgtattggtatgagatttgctttgatgaacatgaagttggctgttactaaggttttgcaaaacttttcttttcaaccatgtcaagaaactcaaattccattgaagttgtctagacaaggtattttgcaaccagaaaagccaattgttttgaaggttgttccaagagatgctgttattactggtgcttaa

SEQ ID NO: 9251 - protein, 504 aa, Mus musculus
MNLFSALSLDTLVLLAIILVLLYRYGTRTHGLFKKQGIPGPKPLPFLGTVLNYYTGIWKFDMECYEKYGKTWGLFDGQTPLLVITDPETIKNVLVKDCLSVFTNRREFGPVGIMSKAISISKDEEWKRYRALLSPTFTSGRLKEMFPVIEQYGDILVKYLRQEAEKGMPVAMKDVLGAYSMDVITSTSFGVNVDSLNNPEDPFVEEAKKFLRVDFFDPLLFSVVLFPLLTPVYEMLNICMFPNDSIEFFKKFVDRMQESRLDSNQKHRVDFLQLMMNSHNNSKDKDSHKAFSNMEITVQSIIFISAGYETTSSTLSFTLYCLATHPDIQKKLQAEIDKALPNKATPTCDTVMEMEYLDMVLNETLRLYPIVTRLERVCKKDVELNGVYIPKGSMVMIPSYALHHDPQHWPDPEEFQPERFSKENKGSIDPYVYLPFGIGPRNCIGMRFALMNMKLAVTKVLQNFSFQPCQETQIPLKLSRQGILQPEKPIVLKVVPRDAVITGA

SEQ ID NO: 9252 - DNA, 2037 bp, Mus musculus
atgggtgattctcatgaagatacttctgctactgttccagaagctgttgctgaagaagtttctttgttttctactactgatattgttttgttttctttgattgttggtgttttgacttactggtttatttttaagaagaagaaggaagaaattccagaattttctaagattcaaactactgctccaccagttaaggaatcttcttttgttgaaaagatgaagaagactggtagaaacattattgttttttacggttctcaaactggtactgctgaagaatttgctaacagattgtctaaggatgctcatagatacggtatgagaggtatgtctgctgatccagaagaatacgatttggctgatttgtcttctttgccagaaattgataagtctttggttgttttttgtatggctacttacggtgaaggtgatccaactgataacgctcaagatttttacgattggttgcaagaaactgatgttgatttgactggtgttaagtttgctgtttttggtttgggtaacaagacttacgaacattttaacgctatgggtaagtacgttgatcaaagattggaacaattgggtgctcaaagaatttttgaattgggtttgggtgatgatgatggtaacttggaagaagattttattacttggagagaacaattttggccagctgtttgtgaattttttggtgttgaagctactggtgaagaatcttctattagacaatacgaattggttgttcatgaagatatggatactgctaaggtttacactggtgaaatgggtagattgaagtcttacgaaaaccaaaagccaccatttgatgctaagaacccatttttggctgctgttactactaacagaaagttgaaccaaggtactgaaagacatttgatgcatttggaattggatatttctgattctaagattagatacgaatctggtgatcatgttgctgtttacccagctaacgattctactttggttaaccaaattggtgaaattttgggtgctgatttggatgttattatgtctttgaacaacttggatgaagaatctaacaagaagcatccatttccatgtccaactacttacagaactgctttgacttactacttggatattactaacccaccaagaactaacgttttgtacgaattggctcaatacgcttctgaaccatctgaacaagaacatttgcataagatggcttcttcttctggtgaaggtaaggaattgtacttgtcttgggttgttgaagctagaagacatattttggctattttgcaagattacccatctttgagaccaccaattgatcatttgtgtgaattgttgccaagattgcaagctagatactactctattgcttcttcttctaaggttcatccaaactctgttcatatttgtgctgttgctgttgaatacgaagctaagtctggtagagttaacaagggtgttgctacttcttggttgagaactaaggaaccagctggtgaaaacggtagaagagctttggttccaatgtttgttagaaagtctcaatttagattgccatttaagccaactactccagttattatggttggtccaggtactggtgttgctccatttatgggttttattcaagaaagagcttggttgagagaacaaggtaaggaagttggtgaaactttgttgtactacggttgtagaagatctgatgaagattacttgtacagagaagaattggctagatttcataaggatggtgctttgactcaattgaacgttgctttttctagagaacaagctcataaggtttacgttcaacatttgttgaagagagataaggaacatttgtggaagttgattcatgaaggtggtgctcatatttacgtttgtggtgatgctagaaacatggctaaggatgttcaaaacactttttacgatattgttgctgaatttggtccaatggaacatactcaagctgttgattacgttaagaagttgatgactaagggtagatactctttggatgtttggtcttaa

SEQ ID NO: 9253 - protein, 678 aa, Mus musculus
MGDSHEDTSATVPEAVAEEVSLFSTTDIVLFSLIVGVLTYWFIFKKKKEEIPEFSKIQTTAPPVKESSFVEKMKKTGRNIIVFYGSQTGTAEEFANRLSKDAHRYGMRGMSADPEEYDLADLSSLPEIDKSLVVFCMATYGEGDPTDNAQDFYDWLQETDVDLTGVKFAVFGLGNKTYEHFNAMGKYVDQRLEQLGAQRIFELGLGDDDGNLEEDFITWREQFWPAVCEFFGVEATGEESSIRQYELVVHEDMDTAKVYTGEMGRLKSYENQKPPFDAKNPFLAAVTTNRKLNQGTERHLMHLELDISDSKIRYESGDHVAVYPANDSTLVNQIGEILGADLDVIMSLNNLDEESNKKHPFPCPTTYRTALTYYLDITNPPRTNVLYELAQYASEPSEQEHLHKMASSSGEGKELYLSWVVEARRHILAILQDYPSLRPPIDHLCELLPRLQARYYSIASSSKVHPNSVHICAVAVEYEAKSGRVNKGVATSWLRTKEPAGENGRRALVPMFVRKSQFRLPFKPTTPVIMVGPGTGVAPFMGFIQERAWLREQGKEVGETLLYYGCRRSDEDYLYREELARFHKDGALTQLNVAFSREQAHKVYVQHLLKRDKEHLWKLIHEGGAHIYVCGDARNMAKDVQNTFYDIVAEFGPMEHTQAVDYVKKLMTKGRYSLDVWS

SEQ ID NO: 9254 - protein, 492 aa, Arabidopsis thaliana
MDPYRVRPSSAHDSPFFTTNSGAPVWNNNSSLTVGTRGPILLEDYHLLEKLANFDRERIPERVVHARGASAKGFFEVTHDITQLTSADFLRGPGVQTPVIVRFSTVIHERGSPETLRDPRGFAVKFYTREGNFDLVGNNFPVFFVRDGMKFPDMVHALKPNPKSHIQENWRILDFFSHHPESLHMFSFLFDDLGIPQDYRHMEGAGVNTYMLINKAGKAHYVKFHWKPTCGIKCLSDEEAIRVGGANHSHATKDLYDSIAAGNYPQWNLFVQVMDPAHEDKFDFDPLDVTKIWPEDILPLQPVGRLVLNKNIDNFFNENEQIAFCPALVVPGIHYSDDKLLQTRIFSYADSQRHRLGPNYLQLPVNAPKCAHHNNHHDGFMNFMHRDEEVNYFPSRLDPVRHAEKYPTTPIVCSGNREKCFIGKENNFKQPGERYRSWDSDRQERFVKRFVEALSEPRVTHEIRSIWISYWSQADKSLGQKLATRLNVRPNF

SEQ ID NO: 9255 - protein, 492 aa, Arabidopsis thaliana
MDPYKYRPASSYNSPFFTTNSGAPVWNNNSSMTVGPRGPILLEDYHLVEKLANFDRERIPERVVHARGASAKGFFEVTHDISNLTCADFLRAPGVQTPVIVRFSTVIHERGSPETLRDPRGFAVKFYTREGNFDLVGNNFPVFFIRDGMKFPDMVHALKPNPKSHIQENWRILDFFSHHPESLNMFTFLFDDIGIPQDYRHMDGSGVNTYMLINKAGKAHYVKFHWKPTCGVKSLLEEDAIRVGGTNHSHATQDLYDSIAAGNYPEWKLFIQIIDPADEDKFDFDPLDVTKTWPEDILPLQPVGRMVLNKNIDNFFAENEQLAFCPAIIVPGIHYSDDKLLQTRVFSYADTQRHRLGPNYLQLPVNAPKCAHHNNHHEGFMNFMHRDEEVNYFPSRYDQVRHAEKYPTPPAVCSGKRERCIIEKENNFKEPGERYRTFTPERQERFIQRWIDALSDPRITHEIRSIWISYWSQADKSLGQKLASRLNVRPSI

SEQ ID NO: 9256 - protein, 492 aa, Arabidopsis thaliana
MDPYKYRPSSAYNAPFYTTNGGAPVSNNISSLTIGERGPVLLEDYHLIEKVANFTRERIPERVVHARGISAKGFFEVTHDISNLTCADFLRAPGVQTPVIVRFSTVVHERASPETMRDIRGFAVKFYTREGNFDLVGNNTPVFFIRDGIQFPDVVHALKPNPKTNIQEYWRILDYMSHLPESLLTWCWMFDDVGIPQDYRHMEGFGVHTYTLIAKSGKVLFVKFHWKPTCGIKNLTDEEAKVVGGANHSHATKDLHDAIASGNYPEWKLFIQTMDPADEDKFDFDPLDVTKIWPEDILPLQPVGRLVLNRTIDNFFNETEQLAFNPGLVVPGIYYSDDKLLQCRIFAYGDTQRHRLGPNYLQLPVNAPKCAHHNNHHEGFMNFMHRDEEINYYPSKFDPVRCAEKVPTPTNSYTGIRTKCVIKKENNFKQAGDRYRSWAPDRQDRFVKRWVEILSEPRLTHEIRGIWISYWSQADRSLGQKLASRLNVRPSI

SEQ ID NO: 9257 - DNA, 23 bp, Artificial Sequence
  Description of Artificial Sequence: Synthetic oligonucleotide
  forward primer of CYP3A4
tgcctaataaagctcctcctact

SEQ ID NO: 9258 - DNA, 22 bp, Artificial Sequence
  Description of Artificial Sequence: Synthetic oligonucleotide
  reverse primer of CYP3A4
gctcctgaaacagttccatctc

SEQ ID NO: 9259 - DNA, 22 bp, Artificial Sequence
  Description of Artificial Sequence: Synthetic oligonucleotide
  forward primer of P450 oxidoreductase
ggaagagctttggttcctatgt

SEQ ID NO: 9260 - DNA, 23 bp, Artificial Sequence
  Description of Artificial Sequence: Synthetic oligonucleotide
  reverse primer of P450 oxidoreductase
gctcccaattcagcaacaatatc

SEQ ID NO: 9261 - DNA, 29 bp, Artificial Sequence
  Description of Artificial Sequence: Synthetic oligonucleotide
  forward primer of CBDA synthase
acatcacaatcacacaaaactaacaaaag

SEQ ID NO: 9262 - DNA, 22 bp, Artificial Sequence
  Description of Artificial Sequence: Synthetic oligonucleotide
  reverse primer of CBDA synthase
ggccatagtttctcatcaatgg

SEQ ID NO: 9263 - DNA, 28 bp, Artificial Sequence
  Description of Artificial Sequence: Synthetic oligonucleotide
  forward primer of UGT76G1
gattggaagaacaagcttcaggatttcc

SEQ ID NO: 9264 - DNA, 26 bp, Artificial Sequence
  Description of Artificial Sequence: Synthetic oligonucleotide
  reverse primer of UGT76G1
ccatcctgaatgagtccaaaaagctc

SEQ ID NO: 9265 - DNA, 22 bp, Artificial Sequence
  Description of Artificial Sequence: Synthetic oligonucleotide
  forward primer of ABCG2
ccttcaggattgtcaggagatg

SEQ ID NO: 9266 - DNA, 22 bp, Artificial Sequence
  Description of Artificial Sequence: Synthetic oligonucleotide
  reverse primer of ABCG2
gcaggtccatgaaacatcaatc

SEQ ID NO: 9267 - DNA, 27 bp, Artificial Sequence
  Description of Artificial Sequence: Synthetic oligonucleotide
  forward primer of Trichome-targeted CBDAs
aaagatcaaaagcaagttcttcactgt

SEQ ID NO: 9268 - DNA, 25 bp, Artificial Sequence
  Description of Artificial Sequence: Synthetic oligonucleotide
  reverse primer of Trichome-targeted CBDAs
ccatgcagtttggctatgaacatct

SEQ ID NO: 9269 - DNA, 25 bp, Artificial Sequence
  Description of Artificial Sequence: Synthetic oligonucleotide
  forward primer of Trichome-targeted UGT
agtgctcaacattctccttttggtt

SEQ ID NO: 9270 - DNA, 25 bp, Artificial Sequence
  Description of Artificial Sequence: Synthetic oligonucleotide
  reverse primer of Trichome-targeted UGT
tctgaagccaacatcaacaattcca

SEQ ID NO: 9271 - DNA, 25 bp, Artificial Sequence
  Description of Artificial Sequence: Synthetic oligonucleotide
  forward primer of Plasma membrane-targeted UTRI
ttgttccttaaacctcgcctttgac

SEQ ID NO: 9272 - DNA, 25 bp, Artificial Sequence
  Description of Artificial Sequence: Synthetic oligonucleotide
  reverse primer of Plasma membrane-targeted UTRI
tcattatggagcactccactctctg

SEQ ID NO: 9273 - DNA, 27 bp, Artificial Sequence
  Description of Artificial Sequence: Synthetic oligonucleotide
  forward primer of Cytosolic-targeted CBDA synthase
aaagatcaaaagcaagttcttcactgt

SEQ ID NO: 9274 - DNA, 25 bp, Artificial Sequence
  Description of Artificial Sequence: Synthetic oligonucleotide
  reverse primer of Cytosolic-targeted CBDA synthase
ataaacttctccaagggtagctccg

SEQ ID NO: 9275 - DNA, 25 bp, Artificial Sequence
  Description of Artificial Sequence: Synthetic oligonucleotide
  forward primer of Cytosolic-targeted UGT
agaactggaagaatccgaactggaa

SEQ ID NO: 9276 - DNA, 25 bp, Artificial Sequence
  Description of Artificial Sequence: Synthetic oligonucleotide
  reverse primer of Cytosolic-targeted UGT
aaatcatcgggacaccttcacaaac

SEQ ID NO: 9277 - DNA, 25 bp, Artificial Sequence
  Description of Artificial Sequence: Synthetic oligonucleotide
  Forward primer of NtGT1
atgaaaacaacagaacttgtcttca

SEQ ID NO: 9278 - DNA, 22 bp, Artificial Sequence
  Description of Artificial Sequence: Synthetic oligonucleotide
  Reverse primer of NtGT1
tgaagttgtaggcctagcatgg

SEQ ID NO: 9279 - DNA, 25 bp, Artificial Sequence
  Description of Artificial Sequence: Synthetic oligonucleotide
  Forward primer of NtGT2
atggttcaaccacacgtcttactgg

SEQ ID NO: 9280 - DNA, 22 bp, Artificial Sequence
  Description of Artificial Sequence: Synthetic oligonucleotide
  Reverse primer of NtGT2
ttgaatacaccagttggggtcg

SEQ ID NO: 9281 - DNA, 25 bp, Artificial Sequence
  Description of Artificial Sequence: Synthetic oligonucleotide
  Forward primer of NtGT3
atgaaagagactaaaaaaattgagt

SEQ ID NO: 9282 - DNA, 23 bp, Artificial Sequence
  Description of Artificial Sequence: Synthetic oligonucleotide
  Reverse primer of NtGT3
catcacgcagattttgaatatgg

SEQ ID NO: 9283 - DNA, 25 bp, Artificial Sequence
  Description of Artificial Sequence: Synthetic oligonucleotide
  Forward primer of NtGT4
atggctactcaggtgcataaattgc

SEQ ID NO: 9284 - DNA, 22 bp, Artificial Sequence
  Description of Artificial Sequence: Synthetic oligonucleotide
  Reverse primer of NtGT4
ggccttagttagctcgacacgg

SEQ ID NO: 9285 - DNA, 25 bp, Artificial Sequence
  Description of Artificial Sequence: Synthetic oligonucleotide
  Forward primer of NtGT5
atgggctctatcggtgcagaactaa

SEQ ID NO: 9286 - DNA, 22 bp, Artificial Sequence
  Description of Artificial Sequence: Synthetic oligonucleotide
  Reverse primer of NtGT5
cggggatgaagtccaaggttgt

SEQ ID NO: 9287 - DNA, 25 bp, Artificial Sequence
  Description of Artificial Sequence: Synthetic oligonucleotide
  Forward primer of Kat-E
atgtctcaacataacgagaaaaacc

SEQ ID NO: 9288 - DNA, 22 bp, Artificial Sequence
  Description of Artificial Sequence: Synthetic oligonucleotide
  Reverse primer of Kat-E
cgtagcaaatcccctgatgtct

SEQ ID NO: 9289 - DNA, 25 bp, Artificial Sequence
  Description of Artificial Sequence: Synthetic oligonucleotide
  Forward primer of UGT76G1
atggagaacaaaaccgagacaaccg

SEQ ID NO: 9290 - DNA, 22 bp, Artificial Sequence
  Description of Artificial Sequence: Synthetic oligonucleotide
  Reverse primer of UGT76G1
cctttagcatgggaaaaccgga

SEQ ID NO: 9291 - DNA, 28 bp, Artificial Sequence
  Description of Artificial Sequence: Synthetic oligonucleotide
  Forward primer of UGT76G1 (for tobacco BY2 cells)
gattggaagaacaagcttcaggatttcc

SEQ ID NO: 9292 - DNA, 26 bp, Artificial Sequence
  Description of Artificial Sequence: Synthetic oligonucleotide
  Reverse primer of UGT76G1 (for tobacco BY2 cells)
ccatcctgaatgagtccaaaaagctc

SEQ ID NO: 9293 - DNA, 22 bp, Artificial Sequence
  Description of Artificial Sequence: Synthetic oligonucleotide
  Forward primer of ABCG2 (for tobacco BY2 cells)
ccttcaggattgtcaggagatg

SEQ ID NO: 9294 - DNA, 22 bp, Artificial Sequence
  Description of Artificial Sequence: Synthetic oligonucleotide
  Reverse primer of ABCG2 (for tobacco BY2 cells)
gcaggtccatgaaacatcaatc
